(19) United States
(12) Patent Application Publication
(10) Pub. No.: US 2020/0291355 A1
(43) Pub. Date: Sep. 17, 2020

(54) ENGINEERED ERYTHROID CELLS INCLUDING LOADABLE ANTIGEN-PRESENTING POLYPEPTIDES AND METHODS OF USE

(71) Applicant: Rubius Therapeutics, Inc., Cambridge, MA (US)

(72) Inventors: Tiffany Fen-Yi Chen, Cambridge, MA (US); Thomas Joseph Wickham, Groton, MA (US); Christopher Lawrence Moore, Boston, MA (US); Shamael Rabia Dastagir, Somerville, MA (US); Douglas Charles Mclaughlin, Quincy, MA (US); Regina Sophia Salvat, Cambridge, MA (US); Alex Richard Nanna, Cambridge, MA (US)

(21) Appl. No.: 16/796,801

(22) Filed: Feb. 20, 2020

Related U.S. Application Data
(60) Provisional application No. 62/938,839, filed on Nov. 21, 2019.
(60) Provisional application No. 62/926,222, filed on Oct. 25, 2019.
(60) Provisional application No. 62/877,190, filed on Jul. 22, 2019.
(60) Provisional application No. 62/808,253, filed on Feb. 20, 2019.

(51) Int. Cl. C12N 5/078; C07K 14/74

(52) U.S. Cl. CPC C12N 5/0641; C07K 2319/03; C12N 2510/00; C07K 14/70539

(57) ABSTRACT

The present disclosure provides customizable enucleated erythroid cells or enucleated cells that can be engineered to include, on their surface, a loadable exogenous antigen-presenting polypeptide, wherein the loadable exogenous antigen-presenting polypeptide comprises one or more amino acid substitutions. In some embodiments, the one or more amino acid substitutions stabilize the loadable exogenous antigen-presenting polypeptide on the cell surface. In some embodiments, the loadable exogenous antigen-presenting polypeptide is stabilized on the cell surface in the absence of a polypeptide bound to the loadable exogenous antigen-presenting polypeptide. In some embodiments, the loadable exogenous antigen-presenting polypeptide comprises an exogenous displaceable polypeptide bound to the loadable exogenous antigen-presenting polypeptide. In some embodiments, the loadable exogenous antigen-presenting polypeptide is stabilized on the cell surface upon release of the displaceable polypeptide.

### RELATED APPLICATIONS

[0001] This application claims the benefit of priority to U.S. Provisional Patent Application No. 62/808,253, filed Feb. 20, 2019, U.S. Provisional Patent Application No. 62/877,190, filed Jul. 22, 2019, U.S. Provisional Patent Application No. 62/926,222, filed Oct. 25, 2019, and U.S. Provisional Patent Application No. 62/938,839, filed Nov. 21, 2019. The contents of each of these applications are incorporated herein by reference in its entirety.

### SEQUENCE LISTING

[0002] The instant application contains a Sequence Listing which has been submitted electronically in ASCII format and is hereby incorporated by reference in its entirety. Said ASCII copy, created on Feb. 20, 2020, is named 129267-01205_SL.txt and is 680,946 bytes in size.

### BACKGROUND

[0003] Active immune responses depend on efficient presentation of antigens and co-stimulatory signals by antigen-presenting cells (APCs). Upon internalization of an antigen, the APCs can display antigen-class I and II major histocompatibility complex (MHC) on the membrane together with co-stimulatory signals to activate antigen-specific T cells, which play a key role in the adaptive immune response. In vivo, induction of T cell responses is highly dependent on interactions with professional APCs, in particular dendritic cells (DCs), which present, for example, tumor-specific antigens. Generally, antigen-specific T cells can be primed and amplified ex vivo before they are transferred back to the subject. For example, in adoptive cell transfer (ACT), tumor-specific T cells are isolated then expanded ex vivo to obtain a large number of cells for transfusion. As one of the APCs, DCs are usually used to maximize T cell stimulation ex vivo. However, the use of natural APCs, such as DCs, has been met with certain challenges, including lack of knowledge of the optimal antigen-loaded DC, and mixed results have been found in clinical trials (Steenblock et al. (2009) Expert Opin. Biol. Ther. 9: 451-64; Melief (2008) Immunity 29: 372-83; Palucka and Banchereau (2013) Immunity 39: 38-48). In addition, isolation and ex vivo stimulation of autologous DCs is time-consuming and expensive, and the quality of ex vivo-generated DCs can be variable (Steenblock et al. (2009); Kim et al. (2004) Nat. Biotechnol. 22: 403-10). The use of subject-derived autologous DCs therefore limits standardization of DC-based treatment protocols (see Steenblock et al. (2009); and Kim et al. (2004)).

[0004] Artificial APCs (aAPCs) are engineered platforms for T cell activation and expansion that aim to avoid the aforementioned obstacles while mimicking the interaction between DCs and T cells. They include multiple systems, including synthetic biomaterials that have been engineered to activate and/or expand desirable immune cell populations (e.g., T cells). These systems may act by mimicking the interaction between DCs and T cells. For instance, several cell-sized, rigid, beads, such as latex microbeads, polystyrene-coated magnetic microbeads and biodegradable poly(lactic-co-glycolic acid) microparticles, have been developed. The efficacy of these beads in inducing activation and/or expansion of immune cells appears to be highly dependent on the properties of the materials used. For example, beads greater than 200 nm are typically retained at the site of inoculation, while smaller particles may be taken up by DCs (see, e.g., Reddy et al. (2006) J. Control. Release 112: 26-34). In contrast, the membrane of natural APCs is much more dynamic than the outer surface of these beads.

[0005] There remains a need for improved ways to stimulate T cells and to promulgate sufficient numbers of therapeutic T cells for adoptive immunotherapy. In particular, there is a need for aAPCs capable of presenting exogenous antigenic polypeptides that are customizable so as to present any antigenic polypeptide of interest to induce a desired response.

### SUMMARY

[0006] The present disclosure relates to customizable engineered erythroid cells (e.g., engineered enucleated erythroid cells) or enucleated cells (e.g., modified enucleated cells), that are engineered to include, on their surface (e.g., on the plasma membrane) a loadable exogenous antigen-presenting polypeptide and are capable of, inter alia, activating, expanding or differentiating/de-differentiating T cells, suppressing T cell activity, suppressing T effector cells, and/or stimulating and expanding T regulatory cells. The engineered erythroid cells or enucleated cells described herein offer numerous advantages over other cells that present antigens to activate an immune response. For example, provided herein are engineered erythroid cells or enucleated cells that are readily customizable to present a selected exogenous antigenic polypeptide of interest on a loadable exogenous antigen-presenting polypeptide, for administration to a subject in need thereof.

[0007] In some aspects, the present disclosure provides an engineered enucleated erythroid cell comprising a loadable exogenous antigen-presenting polypeptide on the cell surface, wherein the loadable exogenous antigen-presenting polypeptide comprises one or more amino acid substitutions which stabilize the loadable exogenous antigen-presenting polypeptide on the cell surface. In some embodiments, the loadable exogenous antigen-presenting polypeptide is stabilized in the absence of a polypeptide bound to (e.g., the antigen-binding cleft of) the exogenous antigen-presenting polypeptide.

[0008] In some embodiments, the engineered enucleated erythroid cell further comprises an exogenous antigenic polypeptide bound to the loadable exogenous antigen-presenting polypeptide.

[0009] In some embodiments, the loadable exogenous antigen-presenting polypeptide has a higher affinity for the exogenous antigenic polypeptide than for an exogenous displaceable polypeptide.

[0010] In some embodiments, the exogenous antigenic polypeptide binds to the loadable exogenous antigen-presenting polypeptide with a K_{D} of from about 1 picomolar to about 100 nanomolar.

[0011] In some embodiments, the exogenous antigenic polypeptide comprises an amino acid sequence provided in any one of Tables 7-8, 16-26, or B. In some embodiments, the exogenous antigenic polypeptide comprises an amino acid sequence provided in Table 7.

[0012] In some embodiments, the exogenous antigenic polypeptide is non-covalently attached to the loadable exogenous antigen-presenting polypeptide. In other embodiments, the exogenous antigenic polypeptide is covalently attached to the loadable exogenous antigen-presenting polypeptide.

[0013] In some embodiments, the exogenous antigenic polypeptide is covalently attached to the loadable exogenous antigen-presenting polypeptide by a linker.

[0014] In some embodiments, the loadable exogenous antigen-presenting polypeptide comprises a linker, wherein the linker comprises an acceptor sequence for conjugation of an exogenous antigenic polypeptide.

[0015] In some embodiments, the linker is between about 10 amino acids and 30 amino acids in length. In other embodiments, the linker is about 15 amino acid residues in length.

[0016] In some embodiments, wherein the loadable exogenous antigen-presenting polypeptide comprises a transmembrane domain. In some embodiments, the transmembrane domain comprises a transmembrane domain of a Type 1 membrane protein. In some embodiments, the Type 1 membrane protein comprises glycophorin A (GPA).

[0017] In some embodiments, the engineered enucleated erythroid cell further comprises a displaceable exogenous polypeptide bound to the loadable exogenous antigen-presenting polypeptide.

[0018] In some embodiments, the exogenous displaceable polypeptide is capable of being displaced from the loadable exogenous antigen-presenting polypeptide by an exogenous antigenic polypeptide.

[0019] In some embodiments, the exogenous displaceable polypeptide is between about 6 amino acids in length to about 30 amino acids in length.

[0020] In some embodiments, the exogenous displaceable polypeptide binds to the loadable exogenous antigen-presenting polypeptide with a K_{D} of from about 1 nM to about 100 μM.

[0021] In some embodiments, the exogenous displaceable polypeptide comprises an amino acid sequence provided in Table 6.

[0022] In some embodiments, the loadable exogenous antigen-presenting polypeptide and the exogenous displaceable polypeptide are comprised in a single chain fusion protein. In some embodiments, the single chain fusion protein comprises a linker disposed between the loadable exogenous antigen-presenting polypeptide and the exogenous displaceable polypeptide.

[0023] In some embodiments, the linker comprises an enzymatic cleavage site. In some embodiments, the enzymatic cleavage site comprises the amino acid sequence LEVLFQGP (SEQ ID NO: 1). In some embodiments, the enzymatic cleavage site comprises the amino acid sequence ENLYFQG (SEQ ID NO: 2). In some embodiments, the enzymatic cleavage site is within 10 amino acids or less from a GGG motif. In some embodiments, the enzymatic cleavage site is within 10 amino acids or less from an LPTXG motif (SEQ ID NO: 3). In some embodiments, the enzymatic cleavage site is within 10 amino acids or less from the amino acid sequence AHIVMVDAYKPTK (SEQ ID NO: 4). In some embodiments, the enzymatic cleavage site is within 10 amino acids or less from the amino acid sequence ATHIKFSKRD (SEQ ID NO: 5).

[0024] In some embodiments, the linker is between about 10 amino acids and 30 amino acids in length. In some embodiments, the linker is about 15 amino acid residues in length.

[0025] In some embodiments, the single chain fusion protein comprises a transmembrane domain. In some embodiments, the transmembrane domain comprises a transmembrane domain of a Type 1 membrane protein. In some embodiments, the Type 1 membrane protein comprises glycophorin A (GPA).

[0026] In some embodiments, the loadable exogenous antigen-presenting polypeptide comprises a human leukocyte antigen a (HLA) heavy chain polypeptide and a beta-2-microglobulin (β2M) polypeptide, or a fragment thereof.

[0027] In some embodiments, the loadable exogenous antigen-presenting polypeptide comprises a linker disposed between the HLAα heavy chain polypeptide and the (32M polypeptide.

[0028] In some embodiments, the linker is a GlySer linker.

[0029] In some embodiments, the linker is about 2 to about 30 amino acid residues in length.

[0030] In some embodiments, the linker is about 18 amino acid residues in length.

[0031] In some embodiments, the HLA heavy chain polypeptide is derived from an HLA class I polypeptide.

[0032] In some embodiments, the HLA class I polypeptide is selected from the group consisting of: HLA-A, HLA-B, HLA-C, HLA-E, and HLA-G.

[0033] In some embodiments, the HLA-A polypeptide comprises an HLA-A allele selected from the group consisting of: A*01:01, A*02:01, A *03:01, A*24:02, A*11:01, A*29:02, A*32:01, A*68:01, A*31:01, A*25:01, A*26:01, A*23:01, and A*30:01.

[0034] In some embodiments, the HLA-B polypeptide comprises an HLA-B allele selected from the group consisting of: B*08:01, B*07:02, B*44:02, B*15:01, B*40:01, B*44:03, B*35:01, B*51:01, B*27:05, B*57:01, B*18:01, B*14:02, B*13:02, B*55:01, B*14:01, B*49:01, B*37:01, B*38:01, B*39:01, B*35:03, and B*40:02.

[0035] In some embodiments, HLA-C polypeptide comprises an HLA-C allele selected from the group consisting of: C*07:01, C*07:02, C*05:01, C*06:02, C*04:01, C*03:04, C*03:03, C*02:02, C*16:01, C*08:02, C*12:03, C*01:02, C*15:02, C*07:04, and C*14:02.

[0036] In some embodiments, the HLA-E polypeptide comprises an HLA-E allele selected from the group consisting of: E*01:01:01:01, E*01:01:01:02, E*01:01:01:03, E*01:01:01:04, E*01:01:01:05, E*01:01:01:06, E*01:01:01:07, E*01:01:01:08, E*01:01:01:09, E*01:01:01:10, E*01:01:02, E*01:03:01:01, E*01:03:01:02, E*01:03:01:03, E*01:03:01:04, E*01:03:02:01, E*01:03:02:02, E*01:03:03, E*01:03:04, E*01:03:05, E*01:04, E*01:05, E*01:06, E*01:07, E*01:08N, E*01:09 and E*01:10.

[0037] In some embodiments, the HLA-G polypeptide comprises an HLA-G allele selected from the group consisting of: G*01:01:01:01, G*01:01:01:02, G*01:01:01:03, G*01:01:01:04, G*01:01:01:05, G*01:01:01:06, G*01:01:01:07, G*01:01:01:08, G*01:01:02:01, G*01:01:02:02, G*01:01:03:01, G*01:01:03:02, G*01:01:03:03, G*01:01:03:04, G*01:01:04, G*01:01:05, G*01:01:06, G*01:01:07, G*01:01:08, G*01:01:09, G*01:01:11, G*01:01:12, G*01:01:13, G*01:01:14, G*01:01:15, G*01:01:16, G*01:01:17, G*01:01:18, G*01:01:19, G*01:01:20, G*01:01:21, G*01:01:22, G*01:02, G*01:03:01:01, G*01:03:01:02, G*01:04:01:01, G*01:04:01:02, G*01:04:02, G*01:04:03, G*01:04:04, G*01:04:05, G*01:04:06, G*01:05N, G*01:06, G*01:07, G*01:08:01, G*01:08:02, G*01:09, G*01:10 and G*01:11.

[0038] In some embodiments, the loadable exogenous antigen-presenting polypeptide comprises an amino acid substitution to an alanine at the amino acid residue corresponding to position 84 of the alpha chain.

[0039] In some embodiments, the loadable exogenous antigen-presenting polypeptide comprises an amino acid substitution to cysteine at each of the amino acid residues corresponding to positions 84 and 139 of the alpha chain.

[0040] In some embodiments, the loadable exogenous antigen-presenting polypeptide comprises an amino acid substitution to cysteine at each of the amino acid residues corresponding to positions 51 and 175 of the alpha chain.

[0041] In some embodiments, wherein the loadable exogenous antigen-presenting polypeptide comprises at least one pair of amino acid substitutions to cysteine at amino acid residues corresponding to the following positions of the alpha chain: 84 and 139; 51 and 175; 5 and 168; 130 and 157; 135 and 140; 11 and 74; 45 and 63; and 33 and 49.

[0042] In some embodiments, the loadable exogenous antigen-presenting polypeptide comprises an amino acid substitution to cysteine at an amino acid residue corresponding to position 84 of the alpha chain and a cysteine at a second amino acid residue of the linker disposed between the (32M polypeptide and the displaceable exogenous polypeptide.

[0043] In some embodiments, the loadable exogenous antigen-presenting polypeptide comprises an alpha chain derived from an HLA-A*02:01 allele, and wherein the alpha chain comprises an amino acid substitution to glutamic acid at the amino acid residue corresponding to position 115.

[0044] In other embodiments, the HLA heavy chain polypeptide is derived from an HLA class II polypeptide.

[0045] In some embodiments, the HLA class II polypeptide is selected from the group consisting of: HLA-DPα, HLA-DPβ, HLA-DMA, HLA-DMB, HLA DOA, HLA DOB, HLA DQα, HLA DQβ, HLA DRα, and HLA

[0046] In some embodiments, the HLA-DPα polypeptide comprises an allele selected from the group consisting of: DPA1*01:03, DPA1*02:01, DPA1*02:07.

[0047] In some embodiments, the HLA-Dβ polypeptide comprises an allele selected from the group consisting of: DPB1*04:01, DPB1*02:01, DPB1*04:02, DPB1*03:01, DPB1*01:01, DPB1*11:01, DPB1*05:01, DPB1*10:01, DPB1*06:01, DPB1*13:01, DPB1*14:01, and DPB1*17:01.

[0048] In some embodiments, the HLA-DQα polypeptide comprises an allele selected from the group consisting of: DQA1*05:01, DQA1*03:01, DQA1*01:02, DQA1*02:01, DQA1*01:01, DQA1*01:03, and DQA1*04:01.

[0049] In some embodiments, the HLA-DQβ polypeptide comprises an allele selected from the group consisting of: DQB1*03:01, DQB1*02:01, DQB1*06:02, DQB1*05:01, DQB1*02:02, DQB1*03:02, DQB1*06:03, DQB1*03:03, DQB1*06:04, DQB1*05:03, and DQB1*04:02.

[0050] In some embodiments, the HLA-DRβ polypeptide comprises an allele selected from the group consisting of: DRB1*07:01, DRB1*03:01, DRB1*15:01, DRB1*04:01, DRB1*01:01, DRB1*13:01, DRB1*11:01, DRB1*04:04, DRB1*13:02, DRB1*08:01, DRB1*12:01, DRB1*11:04, DRB1*09:01, DRB1*14:01, DRB1*04:07, and DRB1*14:04.

[0051] In some aspects, the present disclosure provides a method of treating a subject in need of an altered immune response, comprising determining an HLA status of the subject, selecting an engineered enucleated erythroid cell comprising a loadable exogenous antigen-presenting polypeptide on the cell surface, wherein the antigen-presenting polypeptide is immunologically compatible with the subject, and wherein the exogenous antigen-presenting polypeptide comprises one or more amino acid substitutions which stabilize the loadable exogenous antigen-presenting polypeptide on the cell surface, contacting the engineered enucleated erythroid cell with an exogenous antigenic polypeptide and administering the engineered enucleated erythroid cell to the subject, thereby treating the subject.

[0052] In some embodiments, the loadable exogenous antigen-presenting polypeptide is stabilized in the absence of a polypeptide bound to the exogenous antigen-presenting polypeptide.

[0053] In some embodiments, the method further comprises conjugating the exogenous antigenic polypeptide to the loadable exogenous antigen-presenting polypeptide.

[0054] In some embodiments, a displaceable exogenous polypeptide is bound to the loadable exogenous antigen-presenting polypeptide.

[0055] In other embodiments, the method further comprises displacing the displaceable exogenous polypeptide from the loadable exogenous antigen-presenting polypeptide with the exogenous antigenic polypeptide prior to administering the engineered enucleated erythroid cell to the subject.

[0056] In other embodiments, the method further comprises conjugating the exogenous antigenic polypeptide to the loadable exogenous antigen-presenting polypeptide.

[0057] In other embodiments, the method further comprises selecting an exogenous antigenic polypeptide.

[0058] In some embodiments, the subject has or is at risk of developing cancer. In other embodiments, the subject has or is at risk of developing an autoimmune disease. In other embodiments, the subject has or is at risk of developing an infectious disease.

[0059] In some aspects, the present disclosure provides a method of making an engineered enucleated erythroid cell comprising an antigen-loaded exogenous antigen-presenting polypeptide, comprising obtaining an engineered enucleated erythroid cell comprising a loadable exogenous antigen-presenting polypeptide on the cell surface, wherein the loadable exogenous antigen-presenting polypeptide comprises one or more amino acid substitutions which stabilize the loadable exogenous antigen-presenting polypeptide on the cell surface, and contacting the engineered enucleated erythroid cell with an exogenous antigenic polypeptide, thereby preparing an engineered enucleated erythroid cell comprising an antigen-loaded exogenous antigen-presenting polypeptide.

[0060] In some embodiments, the loadable exogenous antigen-presenting polypeptide is stabilized in the absence of a polypeptide bound to the exogenous antigen-presenting polypeptide.

[0061] In some embodiments, the method further comprises conjugating the exogenous antigenic polypeptide to the loadable exogenous antigen-presenting polypeptide.

[0062] In some embodiments, the method further comprises selecting an exogenous antigenic polypeptide.

[0063] In some embodiments, a displaceable exogenous polypeptide is bound to the loadable exogenous antigen-presenting polypeptide

[0064] In some embodiments, the method further comprises displacing the displaceable exogenous polypeptide from the loadable exogenous antigen-presenting polypeptide with the exogenous antigenic polypeptide.

[0065] In some aspects, the present disclosure provides a method of making an engineered enucleated erythroid cell comprising a loadable exogenous antigen-presenting polypeptide on the cell surface, comprising introducing an exogenous nucleic acid encoding the loadable exogenous antigen-presenting polypeptide into a nucleated erythroid precursor cell, wherein the loadable exogenous antigen-presenting polypeptide comprises one or more amino acid substitutions which stabilize the loadable exogenous antigen-presenting polypeptide on the cell surface, and culturing the nucleated erythroid precursor cell under conditions suitable for enucleation and production of the loadable exogenous antigen-presenting polypeptide, thereby making an engineered enucleated erythroid cell comprising a loadable exogenous antigen-presenting polypeptide on the cell surface, thereby making the engineered enucleated erythroid cell.

[0066] In some embodiments, the loadable exogenous antigen-presenting polypeptide is stabilized in the absence of a polypeptide bound to the exogenous antigen-presenting polypeptide.

[0067] In some embodiments, the loadable exogenous antigen-presenting polypeptide comprises a linker, wherein the linker comprises an acceptor sequence for conjugation of an exogenous antigenic polypeptide.

[0068] In some embodiments, the linker is between about 10 amino acids and 30 amino acids in length. In some embodiments, the linker is about 15 amino acid residues in length.

[0069] In some embodiments, the loadable exogenous antigen-presenting polypeptide comprises a transmembrane domain,

[0070] In some embodiments, a linker is disposed between the transmembrane domain and the loadable exogenous antigen-presenting polypeptide.

[0071] In some embodiments, the transmembrane domain comprises a transmembrane domain of a Type 1 membrane protein. In some embodiments, the Type I membrane protein comprises a GPA

[0072] In some embodiments, the method further comprises contacting the engineered enucleated erythroid cell with at least one exogenous antigenic polypeptide.

[0073] In some embodiments, the method further comprises conjugating the exogenous antigenic polypeptide to the loadable exogenous antigen-presenting polypeptide.

[0074] In some embodiments, the exogenous nucleic acid further encodes an exogenous displaceable polypeptide.

[0075] In some embodiments, the exogenous loadable antigen-presenting polypeptide and exogenous displaceable polypeptide are comprised in a single chain fusion protein.

[0076] In some embodiments, the single chain fusion protein comprises a linker disposed between the loadable exogenous antigen-presenting polypeptide and the exogenous displaceable polypeptide.

[0077] In some embodiments, the linker comprises an enzymatic cleavage site.

[0078] In some embodiments, the enzymatic cleavage site comprises the amino acid sequence LEVLFQGP (SEQ ID NO: 1). In other embodiments, the enzymatic cleavage site comprises the amino acid sequence ENLYFQG (SEQ ID NO: 2). In other embodiments, the enzymatic cleavage site is within 10 amino acids or less from a GGG motif. In other embodiments, the enzymatic cleavage site is within 10 amino acids or less from an LPTXG motif (SEQ ID NO: 3). In other embodiments, the enzymatic cleavage site is within 10 amino acids or less from the amino acid sequence AHIVMVDAYKPTK (SEQ ID NO: 4).

[0079] In other embodiments, the enzymatic cleavage site is within 10 amino acids or less from the amino acid sequence ATHIKFSKRD (SEQ ID NO: 5).

[0080] In some embodiments, the linker is between about 10 amino acids and 30 amino acids in length. In other embodiments, the linker is about 15 amino acid residues in length.

[0081] In some embodiments, the loadable exogenous antigen-presenting polypeptide comprises a transmembrane domain. In some embodiments, the transmembrane domain comprises a transmembrane domain of a Type 1 membrane protein. In some embodiments, the Type I membrane protein comprises a GPA.

[0082] In some embodiments, the method further comprises contacting the engineered enucleated erythroid cell with an exogenous antigenic polypeptide having a greater binding affinity to the loadable exogenous antigen-presenting polypeptide than the displaceable exogenous polypeptide.

[0083] In some embodiments, the method further comprises contacting the engineered enucleated erythroid cell with a dipeptide.

[0084] In some embodiments, the loadable exogenous antigen-presenting polypeptide comprises HLA-A:02:01, HLA-A1:01, HLA-A3:01, HLA-A24:02, HLA-A26:01, HLA-B7:02, HLA-B08:01, HLA-B27:05, HLA-B27:05, HLA-B39:01, HLA-B40:01, HLA-B58:01, HLA-B15:01, or HLA-E01:01 and the dipeptide is glycyl-leucine (GL), glycyl-methionine (GM), GG, glycyl-alanine (GA), glycyl-valine (GV), glycyl-phenylalanine (GF), leucyl-glycine (LG), glycyl-cyclohexylalanine (G-Cha), glycyl-homoleucine (GHLe), acetylated leucine, or glycyl-arginine (GR).

[0085] In some embodiments, the loadable exogenous antigen-presenting polypeptide comprises HLA-B:27:05 and the dipeptide is GR or G-Cha.

[0086] In some embodiments, the method further comprises contacting the cell with an enzyme under conditions suitable for cleavage of the enzymatic cleavage site.

[0087] In some embodiments, the method further comprises conjugating the exogenous antigenic polypeptide to the loadable exogenous antigen-presenting polypeptide.

[0088] In some embodiments, the exogenous antigenic polypeptide is conjugated to the loadable exogenous antigenic polypeptide using click chemistry.

[0089] In some embodiments, the engineered enucleated erythroid cell described herein can be contacted with multiple exogenous antigenic polypeptides, to allow the binding of the multiple exogenous antigenic polypeptides on the loadable exogenous antigen-presenting polypeptide. In some embodiments, the engineered enucleated erythroid cell described herein can be contacted with one or more exogenous antigenic polypeptides, to allow the binding of the one or more exogenous antigenic polypeptides on the loadable exogenous antigen-presenting polypeptide. In some embodiments, the engineered enucleated erythroid cell described herein can be contacted with two or more exogenous antigenic polypeptides, to allow the binding of the two or more exogenous antigenic polypeptides on the loadable exogenous antigen-presenting polypeptide. In some embodiments, the engineered enucleated erythroid cell described herein can be contacted with three or more exogenous antigenic polypeptides, to allow the binding of the three or more exogenous antigenic polypeptides on the loadable exogenous antigen-presenting polypeptide. In some embodiments, the engineered enucleated erythroid cell described herein can be contacted with four or more exogenous antigenic polypeptides, to allow the binding of the four or more exogenous antigenic polypeptides on the loadable exogenous antigen-presenting polypeptide. In some embodiments, the engineered enucleated erythroid cell described herein can be contacted with five or more exogenous antigenic polypeptides, to allow the binding of the five or more exogenous antigenic polypeptides on the loadable exogenous antigen-presenting polypeptide. In some embodiments, the loadable exogenous antigen-presenting polypeptide comprises an MHC class I polypeptide. In some embodiments, the loadable exogenous antigen-presenting polypeptide comprises an MHC class II polypeptide.

[0090] In some aspects, the present disclosure provides a method of activating an antigen-specific T cell population, the method comprising contacting the T cell population with the engineered enucleated erythroid cell described herein, thereby activating the antigen-specific T cell population.

[0091] In some embodiments, the engineered enucleated erythroid cell described herein can be contacted with multiple antigen-specific T cell populations, to allow the activation of the multiple antigen-specific T cell populations. In some embodiments, the engineered enucleated erythroid cell comprising one or more exogenous antigenic polypeptides can be contacted with one or more antigen-specific T cell populations, to allow the activation of the one or more antigen-specific T cell populations. In some embodiments, the engineered enucleated erythroid cell comprising two or more exogenous antigenic polypeptides can be contacted with two or more antigen-specific T cell populations, to allow the activation of the two or more antigen-specific T cell populations. In some embodiments, the engineered enucleated erythroid cell comprising three or more exogenous antigenic polypeptides can be contacted with three or more antigen-specific T cell populations, to allow the activation of the three or more antigen-specific T cell populations. In some embodiments, the engineered enucleated erythroid cell comprising four or more exogenous antigenic polypeptides can be contacted with four or more antigen-specific T cell populations, to allow the activation of the four or more antigen-specific T cell populations. In some embodiments, the engineered enucleated erythroid cell comprising five or more exogenous antigenic polypeptides can be contacted with five or more antigen-specific T cell populations, to allow the activation of the five or more antigen-specific T cell populations.

### BRIEF DESCRIPTION OF DRAWINGS

[0092] The figures are meant to be illustrative of one or more features, aspects, or embodiments provided herein and are not intended to be limiting.

[0093] FIG. 1 depicts amino acid sequence alignments of exemplary wild-type alleles of HLA-A (i.e., HLA-A*01:01) (SEQ ID NO: 1593), HLA-B (i.e., HLA-B*51:01) (SEQ ID NO: 1594), HLA-C (i.e., HLA-C*12:02) (SEQ ID NO: 1595), HLA-E (i.e., HLA-E*01:03) (SEQ ID NO: 1596), and HLA-G (i.e., HLA-G*01:01) (SEQ ID NO: 922). Each of the depicted amino acid sequences are of the mature protein excluding the N-terminal leader sequence. Amino acid residues that are predicted to stabilize the protein when substituted to cysteine are highlighted in boxes. The consensus shows conserved amino acid residues in greater than half of the exemplary wild-type alleles shown.

[0094] FIGS. 2A-B depict schematics showing exemplary constructs as described herein. FIG. 2A depicts a construct which comprises a loadable exogenous antigen-presenting polypeptide, e.g., an HLA Class I molecule, wherein the HLA Class I molecule comprises an HLA (32M subunit linked to the HLA a subunit, which comprises a transmembrane domain, such as a Type 1 membrane protein transmembrane domain (e.g., a GPA transmembrane domain), wherein the HLA Class I molecule comprises one or more mutations which allow the HLA Class I molecule to be present in a stable conformation on the cell surface in the absence of a bound polypeptide, and wherein the HLA Class I molecule is capable of binding an exogenous antigenic polypeptide. FIG. 2B depicts the exemplary construct of FIG. 2A, further comprising an exogenous displaceable polypeptide bound to the loadable exogenous antigen-presenting polypeptide. In some embodiments, the exogenous displaceable polypeptide can be displaced, e.g., by cleaving an enzyme cleavage site as described herein, to allow for the binding of an exogenous antigenic polypeptide.

[0095] FIGS. 3A-3C are line graphs showing the activation of reporter T lymphocyte cell lines including an HPV E7-specific T-cell receptor after being contacted with engineered enucleated erythroid cells including either (1) an antigen-presenting polypeptide comprising wild-type HLA*02:01 polypeptide, β2M polypeptide, GPA, and FLAG-tag (“wt HLA-A2”); (2) a loadable antigen-presenting polypeptide comprising mutant HLA*02:01 polypeptide having the amino acid substitutions Y84C and A139C, β2M polypeptide, GPA, and a FLAG-tag (“ds HLA-A2”); or (3) a fusion polypeptide comprising an HPV E7 peptide, mutant HLA*02:01 polypeptide having the amino acid substitution Y84A, β2M polypeptide, GPA, and FLAG-tag (“sc trimer”). FIG. 3A is a line graph showing the activation of the reporter T lymphocyte cell line after being contacted with engineered enucleated erythroid cells that had been cultured for 0 days. FIG. 3B is a line graph showing the activation of the reporter T lymphocyte cell line after being contacted with engineered enucleated erythroid cells that had been cultured for 3 days. FIG. 3C is a line graph showing the activation of the reporter T lymphocyte cell line after being contacted with engineered enucleated erythroid cells that had been cultured for 6 days. RLU=relative light units.

[0096] FIGS. 4A and 4B depict the stability of antigen-presenting polypeptides on engineered erythroid cells over a 10-day period. FIG. 4A is a bar graph showing the mean fluorescence intensity (MFI) detected using anti-β2M antibody staining and flow cytometry for engineered enucleated erythroid cells including: (1) a loadable antigen-presenting polypeptide comprising mutant HLA*02:01 polypeptide having the amino acid substitutions Y84C and A139C, 132M polypeptide, GPA, and a FLAG-tag, which was loaded with HPV E7 peptide (“ds +peptide”); (2) an antigen-presenting polypeptide comprising wild-type HLA*02:01 polypeptide, β2M polypeptide, GPA, and FLAG-tag, which was loaded with HPV E7 peptide (“wt +peptide”); (3) a loadable antigen-presenting polypeptide comprising mutant HLA*02:01 polypeptide having the amino acid substitutions Y84C and A139C, β2M polypeptide, GPA, and a FLAG-tag, unloaded (“ds”); or (4) an antigen-presenting polypeptide comprising wild-type HLA*02:01 polypeptide, β2M polypeptide, GPA, and FLAG-tag, unloaded (“wt”). FIG. 4B is a bar graph showing the MFI detected using anti-HLA-A2 antibody staining and flow cytometry for engineered enucleated erythroid cells including: (1) a loadable antigen-presenting polypeptide comprising mutant HLA*02:01 polypeptide having the amino acid substitutions Y84C and A139C, β2M polypeptide, GPA, and a FLAG-tag, which was loaded with HPV E7 peptide (“ds +peptide”); (2) an antigen-presenting polypeptide comprising wild-type HLA*02:01 polypeptide, β2M polypeptide, GPA, and FLAG-tag, which was loaded with HPV E7 peptide (“wt +peptide”); (3) a loadable antigen-presenting polypeptide comprising mutant HLA*02:01 polypeptide having the amino acid substitutions Y84C and A139C, β2M polypeptide, GPA, and a FLAG-tag, unloaded (“ds”); or (4) an antigen-presenting polypeptide comprising wild-type HLA*02:01 polypeptide, β2M polypeptide, GPA, and FLAG-tag, unloaded (“wt”). The MFI for cells cultured during 0, 3, 5, 7, or 10 days is shown.

[0097] FIGS. 5A-5F are line graphs showing the activation of reporter T lymphocyte cell lines including either an HPV E7-specific TCR (FIGS. 5A-5C) or an HPV E6-specific TCR (FIGS. 5D-5F) after being contacted with engineered enucleated erythroid cells including either (1) a fusion polypeptide comprising an HPV E7 peptide, mutant HLA*02:01 polypeptide having the amino acid substitution Y84A, β2M polypeptide, GPA, and FLAG-tag (“sc trimer”); (2) a loadable antigen-presenting polypeptide comprising mutant HLA*02:01 polypeptide having the amino acid substitutions Y84C and A139C, β2M polypeptide, and GPA (without a FLAG-tag) (“ds”); (3) a loadable antigen-presenting polypeptide comprising mutant HLA*02:01 polypeptide having the amino acid substitutions Y84C and A139C, β2M polypeptide, GPA, and a FLAG-tag (“ds+FLAG”); (4) an antigen-presenting polypeptide comprising wild-type HLA*02:01 polypeptide, β2M polypeptide, GPA, and FLAG-tag (“wt+FLAG”); or (5) engineered enucleated erythroid cells generated from untransduced erythroid precursor cells (“Untransduced”). Enucleated erythroid cells including antigen-presenting polypeptides were contacted with both HPV E7 and HPV E6 antigenic polypeptides to load the antigen-presenting polypeptides at the concentrations indicated. FIG. 5A is a line graph showing the activation of the reporter T lymphocyte cell line including an HPV E7-specific TCR after being contacted with the indicated enucleated erythroid cells. Cells including the ds, ds+FLAG, or wt+FLAG antigen-presenting polypeptides were loaded using 10 μg/mL of each of HPV E6 antigenic polypeptide and HPV E7 antigenic polypeptide. FIG. 5B is a line graph showing the activation of the reporter T lymphocyte cell line including an HPV E7-specific TCR after being contacted with the indicated enucleated erythroid cells. Cells including the ds, ds+FLAG, or wt+FLAG antigen-presenting polypeptides were loaded using 1 μg/mL of each of the HPV E6 antigenic polypeptide and the HPV E7 antigenic polypeptide. FIG. 5C is a line graph showing the activation of the reporter T lymphocyte cell line including an HPV E7-specific TCR after being contacted with the indicated enucleated erythroid cells. Cells including the ds, ds+FLAG, or wt+FLAG antigen-presenting polypeptides were loaded using 100 ng/mL of each of the HPV E6 antigenic polypeptide and the HPV E7 antigenic polypeptide. FIG. 5D is a line graph showing the activation of the reporter T lymphocyte cell line including an HPV E6-specific TCR after being contacted with the indicated enucleated erythroid cells. Cells including the ds, ds+FLAG, or wt+FLAG antigen-presenting polypeptides were loaded using 10 μg/mL of each of the HPV E6 antigenic polypeptide and the HPV E7 antigenic polypeptide. FIG. 5E is a line graph showing the activation of the reporter T lymphocyte cell line including an HPV E6-specific TCR after being contacted with the indicated enucleated erythroid cells. Cells including the ds, ds+FLAG, or wt+FLAG antigen-presenting polypeptides were loaded using 1 μg/mL of each of the HPV E6 antigenic polypeptide and the HPV E7 antigenic polypeptide. FIG. 5F is a line graph showing the activation of the reporter T lymphocyte cell line including an HPV E6-specific TCR after being contacted with the indicated enucleated erythroid cells. Cells including the ds, ds+FLAG, or wt+FLAG antigen-presenting polypeptides were loaded using 100 ng/mL of each of the HPV E6 antigenic polypeptide and the HPV E7 antigenic polypeptide. RLU=relative light units.

[0098] FIG. 6 is a plot showing the activation of reporter T lymphocyte cell lines including either an HPV E7-specific TCR or an HPV E6-specific TCR after being contacted with engineered enucleated erythroid cells including either (1) a fusion polypeptide comprising an HPV E7 peptide, mutant HLA*02:01 polypeptide having the amino acid substitution Y84A, β2M polypeptide, GPA, and FLAG-tag (“sc trimer (E7)”); (2) a loadable antigen-presenting polypeptide comprising mutant HLA*02:01 polypeptide having the amino acid substitutions Y84C and A139C, 132M polypeptide, and GPA (without a FLAG-tag) (“ds”); (3) a loadable antigen-presenting polypeptide comprising mutant HLA*02:01 polypeptide having the amino acid substitutions Y84C and A139C, 132M polypeptide, GPA, and a FLAG-tag (“ds+FLAG”); or (4) an antigen-presenting polypeptide comprising wild-type HLA*02:01 polypeptide, β2M polypeptide, GPA, and FLAG-tag (“wt+FLAG”); or with untransduced K562 cells (“UNT K562s”).

[0099] FIGS. 7A-7C are line graphs depicting the binding kinetics of HPV E7 fluorescent antigenic polypeptides onto engineered enucleated erythroid cells including either (1) a loadable antigen-presenting polypeptide comprising mutant HLA*02:01 polypeptide having the amino acid substitutions Y84C and A139C, β2M polypeptide, GPA, and a FLAG-tag (“ds”); or (2) an antigen-presenting polypeptide comprising wild-type HLA*02:01 polypeptide, β2M polypeptide, GPA, and FLAG-tag (“wt”). Cells were loaded with 10 ng/mL of one of the tetramethylrhodamine (TAMRA)-labeled versions of the HPV E7 antigenic polypeptides: HPV E7-GGK or HPV E7-E18K. FIG. 7A is a line graph showing the binding kinetics of HPV E7-GGK or HPV E7-E18K over 90 minutes onto engineered erythroid cells including the ds loadable antigen-presenting polypeptide or the wt antigen-presenting polypeptide at 4° C. FIG. 7B is a line graph showing the binding kinetics of HPV E7-GGK or HPV E7-E18K over 90 minutes onto engineered erythroid cells including the ds loadable antigen-presenting polypeptide or the wt antigen-presenting polypeptide at room temperature. FIG. 7C is a line graph showing the binding kinetics of HPV E7-GGK or HPV E7-E18K over 90 minutes onto engineered erythroid cells including the ds loadable antigen-presenting polypeptide or the wt antigen-presenting polypeptide at 37° C.

[0100] FIGS. 8A-8C are bar graphs showing the activation or expansion of CMV-specific T cells after being contacted with engineered enucleated erythroid cells including either (1) an antigen-presenting polypeptide comprising wild-type HLA*02:01 polypeptide, β2M polypeptide, GPA, and a FLAG-tag (“wt HLA-A2”); or (2) a loadable antigen-presenting polypeptide comprising mutant HLA*02:01 polypeptide having the amino acid substitutions Y84C and A139C, β2M polypeptide, GPA, and a FLAG-tag (“ds HLA-A2”), which were loaded with a CMV antigenic polypeptide (3) erythroid cells generated from untransduced erythroid precursor cells contacted with CMV antigenic polypeptide (UNT-pulsed); or (4) erythroid cells generated from untransduced erythroid precursor cells not contacted with CMV antigenic polypeptide (UNT-non-pulsed). FIG. 8A is a bar graph showing the activation of CMV-specific CD8⁺ T cells after being contacted with the indicated erythroid cells for 4 hours at the specified erythroid cells:T cell ratios, as indicated by the upregulation of NFAT. FIG. 8C is a bar graph showing the activation of CMV-specific CD8⁺ T cells after being contacted with the indicated enucleated erythroid cells for 4 hours at the specified erythroid cells:T cell ratios, as indicated by the upregulation of Nur77. FIG. 8D is a bar graph showing the expansion of the T lymphocytes from PBMCs contacted with the indicated enucleated erythroid cells during 5 days.

[0101] FIG. 9A depicts an exogenous loadable antigen-presenting polypeptides comprising an HLA class II a polypeptide chain (excluding the native transmembrane domain and cytosolic region), and HLA class II β polypeptide chain (excluding the native transmembrane domain and cytosolic region), and a GPA transmembrane domain.

[0102] FIGS. 9B and 9C are plots showing the expression in K562 cells of exogenous antigen-presenting polypeptides comprising either (1) a HLA-DRA*01:01 polypeptide (excluding the native transmembrane domain and cytosolic region), a GlySer linker, HLA-DRB1*01:01 polypeptide (excluding the native transmembrane domain and cytosolic region) and a GPA transmembrane domain (FIG. 9B), or (2) a HLA-DPA1*01:03 polypeptide (excluding the native transmembrane domain and cytosolic region), a GlySer linker, HLA-DPB1*04:01 polypeptide (excluding the native transmembrane domain and cytosolic region), and a GPA transmembrane domain (FIG. 9C).

### DETAILED DESCRIPTION

[0103] The present disclosure is based on the development of readily customizable enucleated erythroid cells or enucleated cells that can be engineered to include, on their surface (e.g., on the plasma membrane), a loadable exogenous antigen-presenting polypeptide, e.g., an HLA polypeptide, and are capable of, inter alia, activating, expanding or differentiating/de-differentiating T cells, suppressing T cell activity, suppressing T effector cells, and/or stimulating and expanding T regulatory cells. In particular, the engineered erythroid cells or enucleated cells provided herein comprise a loadable exogenous antigen-presenting polypeptide on the cell surface which comprises one or more amino acid substitutions. In some embodiments, the one or more amino acid substitutions stabilize the loadable exogenous antigen-presenting polypeptide on the cell surface. In some embodiments, the loadable exogenous antigen-presenting polypeptide is stabilized on the cell surface in the absence of a polypeptide bound to the exogenous antigen-presenting polypeptide.

[0104] The present disclosure also provides enucleated erythroid cells or enucleated cells that can be engineered to include, on their surface (e.g., on the plasma membrane) a wild-type exogenous antigen-presenting polypeptide, e.g., an HLA polypeptide, and are capable of, inter alia, activating, expanding or differentiating/de-differentiating T cells, suppressing T cell activity, suppressing T effector cells, and/or stimulating and expanding T regulatory cells.

[0105] In some embodiments, an exogenous antigenic polypeptide of interest can be selected and bound to the loadable exogenous antigen-presenting polypeptide or wild-type exogenous antigen-presenting polypeptide prior to administration to a subject, thus allowing for customizable therapy specific to the particular subject.

[0106] In some embodiments, the loadable exogenous antigen-presenting polypeptide comprises an exogenous displaceable polypeptide bound to the loadable exogenous antigen-presenting polypeptide (e.g., at the antigen-binding cleft of the loadable exogenous antigen-presenting polypeptide). In some embodiments, the exogenous displaceable polypeptide can be replaced with a selected exogenous antigenic polypeptide of interest prior to administration to a subject.

[0107] In some embodiments of the present disclosure, the engineered erythroid cells are engineered enucleated erythroid cells, e.g., reticulocytes or erythrocytes. In some embodiments of the present disclosure, the enucleated cell (e.g., modified enucleated cell) is a reticulocyte, an erythrocyte or a platelet.

### Definitions

[0108] As used in this specification and the appended claims, the singular forms “a”, “an” and “the” include plural references unless the content clearly dictates otherwise.

[0109] The use of the alternative (e.g., “or”) should be understood to mean either one, both, or any combination thereof of the alternatives.

[0110] As used herein, the term “about,” when referring to a measurable value such as an amount, a temporal duration, and the like, encompasses variations of ±20% or ±10%, more preferably ±5%, even more preferably ±1%, and still more preferably ±0.1% from the specified value, as such variations are appropriate to perform the disclosed methods.

[0111] As used herein, any concentration range, percentage range, ratio range, or integer range is to be understood to include the value of any integer within the recited range and, when appropriate, fractions thereof (such as one tenth and one hundredth of an integer), unless otherwise indicated.

[0112] As used herein, “comprise,” “comprising,” and “comprises” and “comprised of” are meant to be synonymous with “include”, “including”, “includes” or “contain”, “containing”, “contains” and are inclusive or open-ended terms that specifies the presence of what follows e.g. component and do not exclude or preclude the presence of additional, non-recited components, features, element, members, steps, known in the art or disclosed therein.

[0113] As used herein, the terms “such as”, “for example” and the like are intended to refer to exemplary embodiments and not to limit the scope of the present disclosure.

[0114] Unless defined otherwise, all technical and scientific terms used herein have the same meaning as commonly understood by one of ordinary skill in the art to which the disclosure pertains. Although any methods and materials similar or equivalent to those described herein can be used in the practice for testing of the embodiments provided herein, preferred materials and methods are described herein.

[0115] As used herein, the terms “activate,” “stimulate,” “enhance” “increase” and/or “induce” (and like terms) are used interchangeably to generally refer to the act of improving or increasing, either directly or indirectly, a concentration, level, function, activity, or behavior relative to the natural, expected, or average, or relative to a control condition. “Activate” refers to a primary response induced by ligation of a cell surface moiety. For example, in the context of receptors, such stimulation entails the ligation of a receptor and a subsequent signal transduction event. With respect to stimulation of a T cell, such stimulation refers to the ligation of a T cell surface moiety that in some embodiments subsequently induces a signal transduction event, such as binding the TCR/CD3 complex. Further, the stimulation event may activate a cell and upregulate or downregulate expression or secretion of a molecule. Thus, ligation of cell surface moieties, even in the absence of a direct signal transduction event, may result in the reorganization of cytoskeletal structures, or in the coalescing of cell surface moieties, each of which could serve to enhance, modify, or alter subsequent cellular responses. “Activation” includes activation of CD8+ T cells, activation of CD4+ T cells, stimulation of cytotoxic activity of T cells, stimulation of cytokine secretion by T cells, detectable effector functions, modification of the differentiation state of a T cell (e.g. promote expansion and differentiation from T effector to T memory cell), and/or any combination thereof The term “activated T cells” refers to, among other things, T cells that are undergoing cell division.

[0116] As used herein, “altered immune response” refers to changing the form or character of the immune response, for example stimulation or inhibition of the immune response, e.g., as measured by ELISPOT assay (cellular immune response), ICS (intracellular cytokine staining assay) and major histocompatibility complex (MHC) tetramer assay to detect and quantify antigen-specific T cells, quantifying the blood population of antigen-specific CD4+ T cells, or quantifying the blood population of antigen specific CD8+ T cells by a measurable amount, or where the increase is by at least 10%, at least 20%, at least 30%, at least 40%, at least 50%, at least 60%, at least 70%, at least 80%, at least 90%, at least 95%, at least 96%, at least 97%, at least 98%, at least 99%, at least 100%, when compared to a suitable control (e.g., a control composition where DCs are not loaded with tumor-specific cells, or not loaded with peptide derived from tumor-specific cells).

[0117] As used herein, the term “suppress,” “decrease,” “interfere,” “inhibit” and/or “reduce” (and like terms) generally refers to the act of reducing, either directly or indirectly, a concentration, level, function, activity, or behavior relative to the natural, expected, or average, or relative to a control condition.

[0118] As used herein, the terms “suppressing immune cells” or “inhibiting immune cells” refer to a process (e.g., a signaling event) causing or resulting in the inhibition or suppression of one or more cellular responses or activities of an immune cell, selected from: proliferation, differentiation, cytokine secretion, cytotoxic effector molecule release, cytotoxic activity, and expression of activation markers, or resulting in anergizing of an immune cell or induction of apoptosis of an immune cell. Suitable assays to measure immune cell inhibition or suppression are known in the art and are described herein.

[0119] The term “specifically binds,” as used herein refers to the ability of a polypeptide or polypeptide complex to recognize and bind to a ligand in vitro or in vivo while not substantially recognizing or binding to other molecules in the surrounding milieu. In some embodiments, the polypeptide (e.g., an exogenous antigenic polypeptide or a displaceable exogenous polypeptide) binds the antigen-binding cleft of the loadable exogenous antigen-presenting polypeptide. Methods for determining whether two molecules specifically bind are well known in the art and include, for example, equilibrium dialysis, surface plasmon resonance, and the like.

[0120] The term “exogenous antigen-presenting polypeptide” as used herein, refers to a cell surface protein selected from an HLA class I polypeptide (e.g., HLA-A, HLA-B, HLA-C, HLA-E, or HLA-G), or an HLA class II polypeptide (e.g., HLA-DPα, HLA-DPβ, HLA-DMA, HLA-DMB, HLA DOA, HLA DOB, HLA DQα, HLA DQβ, HLA DRα, and HLA DRβ), comprised in a fusion construct, that is capable of binding an antigen and displaying the antigen on the cell surface for recognition by the appropriate immune cells. As used herein, an HLA class I polypeptide includes classical and non-classical HLA class I polypeptides. HLA class I molecules include β2 subunits and are thus only be recognized by CD8 co-receptors. HLA class II molecules include β1 and β2 subunits and thus can be recognized by CD4 co-receptors.

[0121] The term “wild-type exogenous antigen-presenting polypeptide” refers to an exogenous antigen-presenting polypeptide, as described herein, which does not contain one or more amino acid substitution(s) which stabilize the exogenous antigen-presenting polypeptide on a cell surface.

[0122] The term “loadable exogenous antigen-presenting polypeptide” or “loadable antigen-presenting polypeptide” as used herein refers to an exogenous antigen-presenting polypeptide comprised in a fusion construct, comprising one or more amino acid substitutions (including one or more pairs of amino acid substitutions) in the ectodomain of the fusion construct, as compared to the wild-type exogenous antigen-presenting polypeptide from which it was derived, which stabilizes the loadable exogenous antigen-presenting polypeptide on the cell surface. In some embodiments, the loadable exogenous antigen-presenting polypeptide is stabilized on the cell surface in the absence of a bound polypeptide. In some embodiments, the loadable exogenous antigen-presenting polypeptide binds an exogenous polypeptide, e.g., an exogenous antigenic polypeptide, and displays the exogenous polypeptide on the cell surface for recognition by the appropriate T-cells. In some embodiments, the loadable exogenous antigen-presenting polypeptide binds an exogenous displaceable polypeptide. In some embodiments, the exogenous displaceable polypeptide is displaced from the loadable exogenous antigen-presenting polypeptide, and replaced by an exogenous antigenic polypeptide. In some embodiments, the loadable exogenous antigen-presenting polypeptide is stabilized on the cell surface upon release of the displaceable polypeptide.

[0123] As used herein, the term “exogenous” in reference to a polypeptide (e.g., “exogenous polypeptide”) refers to a polypeptide that is introduced into or onto a cell, or is caused to be expressed by the cell by introducing an exogenous nucleic acid encoding the exogenous polypeptide into the cell or into a progenitor of the cell. In some embodiments, an exogenous polypeptide is a polypeptide encoded by an exogenous nucleic acid that was introduced into the cell or a progenitor of the cell, which nucleic acid is optionally not retained by the cell. In some embodiments, the exogenous polypeptide is a loadable exogenous antigen-presenting polypeptide, a wild-type exogenous antigen-presenting polypeptide, an exogenous antigenic polypeptide, an exogenous displaceable polypeptide, a cytokine, a coinhibitory polypeptide or a Treg costimulatory polypeptide. In some embodiments, an exogenous polypeptide is a polypeptide conjugated to the surface of the cell by chemical or enzymatic means.

[0124] The term “exogenous antigenic polypeptide” as used herein refers to an exogenous polypeptide that, together with the exogenous antigen-presenting polypeptide, is capable of inducing an immune response. In some embodiments, an exogenous antigenic polypeptide is bound to a loadable exogenous antigen-presenting polypeptide. In some embodiments, an exogenous antigenic polypeptide is bound to a wild-type exogenous antigen-presenting polypeptide. In some embodiments, a loadable exogenous antigen-presenting polypeptide has a higher affinity for an exogenous antigenic polypeptide than for an exogenous displaceable polypeptide. In some embodiments, an exogenous antigenic polypeptide binds to a loadable exogenous antigen-presenting polypeptide with a K_{D} of from about 1 picomolar to about 100 nanomolar. In some embodiments, a loadable exogenous antigen-presenting polypeptide has a higher affinity for an exogenous antigenic polypeptide than for an exogenous displaceable polypeptide. In some embodiments, the exogenous antigenic polypeptide binds to the loadable exogenous antigen-presenting polypeptide with a K_{D} of from about 1 picomolar to about 100 nanomolar.

[0125] The term “exogenous displaceable polypeptide” as used herein, refers to an exogenous polypeptide that is capable of binding and unbinding from the antigen-binding cleft of a loadable exogenous antigen-presenting polypeptide. In some embodiments, the loadable exogenous antigen-presenting polypeptide has a lower affinity for the exogenous displaceable polypeptide than for an exogenous antigenic polypeptide. In some embodiments, the exogenous displaceable polypeptide binds to the loadable exogenous antigen-presenting polypeptide with a K_{D} of from about 1 nM to about 100 μM. In some embodiments, the exogenous displaceable polypeptide binds to the loadable exogenous antigen-presenting polypeptide with a K_{D} of from about 10 nM to about 100 μM.

[0126] The term “exogenous T cell costimulatory polypeptide” as used herein, includes a polypeptide on an engineered erythroid cell or enucleated cell that specifically binds a cognate co-stimulatory molecule on a T cell (e.g., an HLA molecule, B and T lymphocyte attenuator (CD272), and a Toll like receptor), thereby providing a signal which, in addition to the primary signal provided by, for instance, binding of a TCR/CD3 complex with a wild-type or loadable exogenous antigen-presenting polypeptide loaded with peptide, mediates a T cell response, including, but not limited to, proliferation, activation, differentiation, and the like. A co-stimulatory polypeptide also encompasses, inter alia, an antibody that specifically binds with a co-stimulatory molecule present on a T cell. Exemplary exogenous co-stimulatory polypeptides are described in more detail below.

[0127] The term “exogenous T cell co-inhibitory polypeptide” as used herein refers to any polypeptide that suppresses a T cell, including inhibition of T cell activity, inhibition of T cell proliferation, anergizing of a T cell, or induction of apoptosis of a T cell. Exemplary exogenous co-inhibitory polypeptides are described in more detail below.

[0128] The term “Treg costimulatory polypeptide” as used herein refers to an exogenous polypeptide that expands regulatory T-cells (Tregs). In some embodiments, a Treg costimulatory polypeptide stimulates Treg cells by stimulating at least one of three signals involved in Treg cell development. Exemplary exogenous Treg co-stimulatory polypeptides are described in more detail below.

[0129] As used herein, the terms “click reaction” or “click chemistry” are interchangeably used to refer to a range of reactions used to covalently attach a first and a second moiety, for convenient production of linked products. It typically has one or more of the following characteristics: it is fast, is specific, is high-yield, is efficient, is spontaneous, does not significantly alter biocompatibility of the linked entities, has a high reaction rate, produces a stable product, favors production of a single reaction product, has high atom economy, is chemoselective, is modular, is stereoselective, is insensitive to oxygen, is insensitive to water, is high purity, generates only inoffensive or relatively non-toxic by-products that can be removed by nonchromatographic methods (e.g., crystallization or distillation), needs no solvent or can be performed in a solvent that is benign or physiologically compatible, e.g., water, stable under physiological conditions. Examples include an alkyne/azide reaction, a diene/dienophile reaction, or a thiol/alkene reaction. Other reactions can be used. In some embodiments, the click reaction is fast, specific, and high-yield.

[0130] As used herein, the terms “click handle” or “click chemistry handle” refer to a chemical moiety that is capable of reacting with a second click chemistry handle in a click reaction to produce a click signature. In embodiments, a click chemistry handle is comprised by a coupling reagent, and the coupling reagent may further comprise a substrate reactive moiety.

[0131] As used herein, the term “cytokine” refers to small soluble protein substances secreted by cells which have a variety of effects on other cells. Cytokines mediate many important physiological functions including growth, development, wound healing, and the immune response. Cytokines can act both locally and distantly from a site of release. They include type I cytokines, which encompass many of the interleukins, as well as several hematopoietic growth factors; type II cytokines, including the interferons and interleukin-10; tumor necrosis factor (“TNF”)-related molecules, including TNFα and lymphotoxin; immunoglobulin super-family members, including interleukin 1 (“IL-1”); and the chemokines, a family of molecules that play a critical role in a wide variety of immune and inflammatory functions. The same cytokine can have different effects on a cell depending on the state of the cell. Cytokines often regulate the expression of, and trigger cascades of other cytokines. Non limiting examples of cytokines include e.g., IL-1, IL-2, IL-3, IL-4, IL-5, IL-6, IL-7, IL-8, IL-9, IL-10, IL-11, IL-12/IL-23 P40, IL13, IL-15, IL-15/IL-15-RA, IL-17, IL-18, IL-21, IL-23, TGF-β, IFNγ, GM-CSF, Groα, MCP-1 and TNF-α.

[0132] As used herein, the term “endogenous” is meant to refer to a native form of a compound (e.g., a small molecule) or process. For example, in some embodiments, the term “endogenous” refers to the native form of a nucleic acid or polypeptide in its natural location in an organism or a cell or in the genome of an organism or a cell.

[0133] As used herein, the term “exogenous nucleic acid” refers to a nucleic acid (e.g., a gene) which is not native to a cell, but which is introduced into the cell or a progenitor of the cell. An exogenous nucleic acid may include a region or open reading frame (e.g., a gene) that is homologous to, or identical to, an endogenous nucleic acid native to the cell. In some embodiments, the exogenous nucleic acid comprises RNA. In some embodiments, the exogenous nucleic acid comprises DNA. In some embodiments, the exogenous nucleic acid is integrated into the genome of the cell. In some embodiments, the exogenous nucleic acid is processed by the cellular machinery to produce an exogenous polypeptide. In some embodiments, the exogenous nucleic acid is not retained by the cell or by a cell that is the progeny of the cell into which the exogenous nucleic acid was introduced.

[0134] As used herein, the term “stabilize” refers to an increased or prolonged presence of a loadable exogenous antigen-presenting polypeptide on the cell surface when not bound to an exogenous antigenic polypeptide as compared to the presence of the corresponding wild type antigen-presenting polypeptide when not bound to an exogenous antigenic polypeptide. For example, the loadable exogenous antigen-presenting polypeptide may be displayed on the surface when not bound to an exogenous antigenic polypeptide for an amount of time comparable to the presence of a wild-type exogenous antigen-presenting polypeptide on the cell surface when bound to an exogenous polypeptide. In some embodiments, the loadable exogenous antigen-presenting polypeptide may be displayed on the surface when not bound to an exogenous polypeptide for 10%, 20%, 30%, 40%, 50%, 60%, 70%, 80%, 90% or 100% the amount of time a wild-type exogenous antigen-presenting polypeptide is present on the cell surface when bound to an exogenous polypeptide. Methods of determining levels of exogenous antigen-presenting polypeptide are known in the art and include, for example, flow cytometry.

[0135] As used herein, the term “immunologically compatible” refers to a nucleic acid, polypeptide, a cell, or any combination thereof that is recognized as self by a subject's immune system, or that is not capable of eliciting an immune response in a subject.

[0136] As used herein, the term “immunologically incompatible” refers to a nucleic acid, polypeptide, a cell, or any combination thereof that is recognized as non-self by a subject's immune system, or that is capable of eliciting an immune response in a subject.

[0137] As used herein, the term “acceptor sequence” refers to a polymeric sequence which conditionally alters the state of another polymeric sequence. An acceptor sequence can comprise a polypeptide sequence, nucleic acid sequence (DNA sequence, aptamer sequence, RNA sequence, ribozyme sequence, hybrid sequence, modified or analogous nucleic acid sequence, etc.), carbohydrate sequence, and the like. Nucleic acid and amino acid sequences for use as acceptor sequences can be naturally occurring sequences, engineered sequences (for example, modified natural sequences), or sequences designed de novo.

[0138] As used herein, the term “engineered cell” refers to a genetically-modified cell or progeny thereof.

[0139] As used herein, the term “enucleated cell” refers to a cell that lacks a nucleus (e.g., due to a differentiation process such as erythropoiesis). In some embodiments, an enucleated cell is incapable of expressing a polypeptide. In some embodiments, an enucleated cell is an erythrocyte, a reticulocyte, or a platelet.

[0140] As used herein, “engineered enucleated cell” refers to a cell that originated from a genetically-modified nucleated cell or progeny thereof, and lacks a nucleus (e.g., due to differentiation). In some embodiments, the engineered enucleated cell includes an exogenous polypeptide that was produced by the genetically-modified nucleated cell or progeny thereof (e.g., prior to enucleation) from which the engineered enucleated cell originated.

[0141] As used herein, “engineered erythroid cell” refers to a genetically-modified erythroid cell or progeny thereof. Engineered erythroid cells include engineered nucleated erythroid cells (e.g., a genetically-modified erythroid precursor cell) and engineered enucleated erythroid cells (e.g., reticulocytes and erythrocytes that originated from a genetically modified erythroid precursor cell).

[0142] As used herein, “engineered enucleated erythroid cell” refers to an erythroid cell that originated from a genetically-modified nucleated erythroid cell or progeny thereof, and lacks a nucleus (e.g., due to differentiation). In some embodiments, an engineered enucleated erythroid cell comprises an erythrocyte or a reticulocyte that originated from a genetically-modified nucleated erythroid cell or progeny thereof. In some embodiments, the engineered enucleated erythroid cell did not originate from an immortalized nucleated erythroid cell or progeny thereof.

[0143] An “erythroid precursor cell”, as used herein, refers to a cell capable of differentiating into a reticulocyte or erythrocyte. Generally, erythroid precursor cells are nucleated. Erythroid precursor cells include a cord blood stem cell, a CD34⁺ cell, a hematopoietic stem cell (HSC), a spleen colony forming (CFU-S) cell, a common myeloid progenitor (CMP) cell, a blastocyte colony-forming cell, a burst forming unit-erythroid (BFU-E), a megakaryocyte-erythroid progenitor (MEP) cell, an erythroid colony-forming unit (CFU-E), an induced pluripotent stem cell (iPSC), a mesenchymal stem cell (MSC), a polychromatic normoblast, and an orthochromatic normoblast. In some embodiments, an erythroid precursor cell is an immortal or immortalized cell. For example, immortalized erythroblast cells can be generated by retroviral transduction of CD34⁺ hematopoietic progenitor cells to express Oct4, Sox2, Klf4, cMyc, and suppress TP53 (e.g., as described in Huang et al. (2014) Mol. Ther. 22(2): 451-63, the entire contents of which are incorporated by reference herein).

[0144] As used herein, the term “express” or “expression” refers to processes by which a cell produces a polypeptide, including transcription and translation. The expression of a particular polypeptide in a cell may be increased using several different approaches, including, but not limited to, increasing the copy number of genes encoding the polypeptide, increasing the transcription of a gene, and increasing the translation of an mRNA encoding the polypeptide.

[0145] As used herein, the terms “first”, “second”, and “third”, etc., with respect to exogenous polypeptides or nucleic acids are used for convenience of distinguishing when there is more than one type of exogenous polypeptide or nucleic acid. Use of these terms is not intended to confer a specific order or orientation of the exogenous polypeptides or nucleic acid unless explicitly so stated.

[0146] As used herein, the term “gene” is used broadly to refer to any segment of nucleic acid associated with expression of a given RNA or protein. Thus, genes include regions encoding expressed RNAs (which typically include polypeptide coding sequences) and, often, the regulatory sequences required for their expression. Genes can be obtained from a variety of sources, including cloning from a source of interest or synthesizing from known or predicted sequence information, and may include sequences designed to have specifically desired parameters.

[0147] As used herein the term “nucleic acid molecule” refers to a single or double-stranded polymer of deoxyribonucleotide and/or ribonucleotide bases. It includes, but is not limited to, chromosomal DNA, plasmids, vectors, mRNA, tRNA, siRNA, etc. which may be recombinant and from which exogenous polypeptides may be expressed when the nucleic acid is introduced into a cell.

[0148] As used herein, the terms “polypeptide”, “peptide” and “protein” are used interchangeably herein to refer to a polymer of amino acid residues. The terms “polypeptide”, “peptide” and “protein” also are inclusive of modifications including, but not limited to, glycosylation, phosphorylation, lipid attachment, sulfation, gamma-carboxylation of glutamic acid residues, hydroxylation, and ADP-ribosylation. It will be appreciated, as is well known and as noted above, that polypeptides may not be entirely linear. For instance, polypeptides may be branched as a result of ubiquitination, and they may be circular, with or without branching, generally as a result of posttranslational events, including natural processing event and events brought about by human manipulation which do not occur naturally.

[0149] As used herein, polypeptides referred to herein as “recombinant” refers to polypeptides which have been produced by recombinant DNA methodology, including those that are generated by procedures which rely upon a method of artificial recombination, such as the polymerase chain reaction (PCR) and/or cloning into a vector using restriction enzymes.

[0150] As used herein, the term “variant” of a polypeptide refers to a polypeptide having at least one amino acid residue difference as compared to a reference polypeptide, e.g., one or more substitutions, insertions, or deletions. In some embodiments, a variant has at least about 70%, 75%, 80%, 85%, 90%, 91%, 92%, 93%, 94% 95%, 96%, 97%, 98%, or 99% identity to that polypeptide. A variant may include a fragment (e.g., an enzymatically active fragment of a polypeptide (e.g., an enzyme). In some embodiments, a fragment may lack up to about 1, 2, 3, 4, 5, 10, 20, 30, 40, 50, or 100 amino acid residues on the N-terminus, C-terminus, or both ends (each independently) of a polypeptide, as compared to the full-length polypeptide. Variants may occur naturally or be non-naturally occurring. Non-naturally occurring variants may be generated using mutagenesis methods known in the art. Variant polypeptides may comprise conservative or non-conservative amino acid substitutions, deletions or additions.

[0151] As used herein, the term “sequence identity” or “identity,” in reference to nucleic acid and amino acid sequences refers to the percentage of amino acid residues or nucleotides in a candidate sequence that are identical with the amino acid residues or nucleotides in the reference sequences after aligning the sequences and introducing gaps, if necessary, to achieve the maximum percent sequence identity, and not considering any conservative substitutions as part of the sequence identity. Optimal alignment of the sequences for comparison may be produced, besides manually, by means of the local homology algorithm of Smith and Waterman, 1981, Ads App. Math. 2, 482; by means of the local homology algorithm of Neddleman and Wunsch, 1970, J. Mol. Bio1.48, 443; by means of the similarity search method of Pearson and Lipman, 1988, Proc. Natl. Acad. Sci. USA 85, 2444; or by means of computer programs which use these algorithms (GAP, BESTFIT, FASTA, BLAST P, BLAST N and TFASTA in Wisconsin Genetics Software Package, Genetics Computer Group, 575 Science Drive, Madison, Wis.).

[0152] As used herein, the term “pharmaceutically acceptable carrier” includes any of the standard pharmaceutical excipients, carrier or stabilizer which are not toxic or deleterious to a mammal being exposed thereto at the dosage and/or concentration employed.

[0153] As used herein, the terms “subject”, “individual” and “patient” are used interchangeably herein and refer to any mammalian subject for whom diagnosis, treatment, or therapy is desired, particularly humans. The methods described herein are applicable to both human therapy and veterinary applications. In some embodiments, the subject is a mammal (e.g., a human subject).

[0154] As used herein, “administration,” “administering” and variants thereof refers to introducing a composition or agent into a subject and includes concurrent and sequential introduction of a composition or agent. “Administration” can refer, e.g., to therapeutic, pharmacokinetic, diagnostic, research, placebo, and experimental methods. “Administration” also encompasses in vitro and ex vivo treatments. The introduction of a composition or agent into a subject is by any suitable route, including orally, pulmonarily, intranasally, parenterally (intravenously, intramuscularly, intraperitoneally, or subcutaneously), rectally, intralymphatically, or topically. Administration includes self-administration and the administration by another. Administration can be carried out by any suitable route. A suitable route of administration allows the composition or the agent to perform its intended function. For example, if a suitable route is intravenous, the composition is administered by introducing the composition or agent into a vein of the subject.

[0155] As used herein, the terms “dose” or “dosage” are used interchangeably to refer to a specific quantity of a pharmacologically active material for administration to a subject for a given time. Unless otherwise specified, the doses recited refer to a plurality of engineered erythroid cells (e.g., engineered enucleated erythroid cells) or enucleated cells (e.g., modified enucleated cells) comprising a polypeptide(s) of interest as described herein. In some embodiments, a dose of engineered erythroid cells or enucleated cells refers to an effective amount of engineered erythroid cells or enucleated cells. When referring to a dose for administration, in an embodiment of any one of the methods, compositions or kits provided herein, any one of the doses provided herein is the dose as it appears on a label/label dose.

[0156] As used herein, the terms “therapeutically effective amount” and “effective amount” are used interchangeably to refer to an amount of an active agent (e.g. an engineered erythroid cell or an enucleated cell described herein) that is sufficient to provide the intended benefit (e.g. prevention, prophylaxis, delay of onset of symptoms, or amelioration of symptoms of a condition, e.g., a cancer, autoimmune disease, or infectious disease. In prophylactic or preventative applications, an effective amount may be administered to a subject susceptible to, or otherwise at risk of developing a disease, disorder or condition (e.g., a cancer, autoimmune disease, or infectious disease) to eliminate or reduce the risk, lessen the severity, or delay the onset of the disease, disorder or condition, including a biochemical, histologic and/or behavioral symptoms of the disease, disorder or condition, its complications, and intermediate pathological phenotypes.

[0157] As used herein the term “therapeutic effect” refers to a consequence of treatment, the results of which are judged to be desirable and beneficial. A therapeutic effect can include, directly or indirectly, the arrest, reduction, or elimination of a disease manifestation. A therapeutic effect can also include, directly or indirectly, the arrest reduction or elimination of the progression of a disease manifestation.

[0158] As used herein, the terms “treat,” “treating,” and/or “treatment” include abrogating, substantially inhibiting, slowing or reversing the progression of a disorder, disease or condition (e.g., a cancer, autoimmune disease, or infectious disease), substantially ameliorating clinical symptoms of a disorder, disease or condition, or substantially preventing the appearance of clinical symptoms of a disorder, disease or condition, obtaining beneficial or desired clinical results. Treating further refers to accomplishing one or more of the following: (a) reducing the severity of the disorder, disease or condition (e.g., a cancer, autoimmune disease, or infectious disease); (b) limiting development of symptoms characteristic of the disorder, disease or condition(s) being treated; (c) limiting worsening of symptoms characteristic of the disorder, disease or condition(s) being treated; (d) limiting recurrence of the disorder, disease or condition(s) in subjects that have previously had the disorder, disease or condition(s); and (e) limiting recurrence of symptoms in subjects that were previously asymptomatic for the disorder, disease or condition(s).

[0159] Beneficial or desired clinical results, such as pharmacologic and/or physiologic effects include, but are not limited to, preventing the disease, disorder or condition from occurring in a subject that may be predisposed to the disease, disorder or condition but does not yet experience or exhibit symptoms of the disease (prophylactic treatment), alleviation of symptoms of the disease, disorder or condition, diminishment of extent of the disease, disorder or condition, stabilization (i.e., not worsening) of the disease, disorder or condition, preventing spread of the disease, disorder or condition, delaying or slowing of the disease, disorder or condition progression, amelioration or palliation of the disease, disorder or condition, and combinations thereof, as well as prolonging survival as compared to expected survival if not receiving treatment.

[0160] As used herein, the term “cancer” refers to diseases in which abnormal cells divide without control. In certain embodiments, the cancer is selected from cancers including, but not limited to, acute lymphoblastic leukemia (ALL), acute myeloid leukemia (AML), anal cancer, bile duct cancer, bladder cancer, bone cancer, bowel cancer, brain tumour, breast cancer, cancer of unknown primary, cancer spread to bone, cancer spread to brain, cancer spread to liver, cancer spread to lung, carcinoid, cervical cancer, choriocarcinoma, chronic lymphocytic leukemia (CLL), chronic myeloid leukemia (CML), colon cancer, colorectal cancer, endometrial cancer, eye cancer, gallbladder cancer, gastric cancer, gestational trophoblastic tumour (GTT), hairy cell leukemia, head and neck cancer, Hodgkin lymphoma, kidney cancer, laryngeal cancer, leukemia, liver cancer, lung cancer, lymphoma, melanoma skin cancer, mesothelioma, men's cancer, molar pregnancy, mouth and oropharyngeal cancer, myeloma, nasal and sinus cancers, nasopharyngeal cancer, non Hodgkin lymphoma (NHL), oesophageal cancer, ovarian cancer, pancreatic cancer, penile cancer, prostate cancer, rare cancers, rectal cancer, salivary gland cancer, secondary cancers, skin cancer (non melanoma), soft tissue sarcoma, stomach cancer, testicular cancer, thyroid cancer, unknown primary cancer, uterine cancer, vaginal cancer, and vulval cancer.

[0161] As used herein, the term “autoimmune disease” refers generally to diseases or conditions in which a subject's immune system attacks the body's own cells, causing tissue destruction or damage. In some embodiments, the term “autoimmune disease” includes any autoimmune disease that is modulated by Follicular helper T (Tfh), Thl cells, and/or T helper 17 (Th17) T cells (see, e.g., Zhang et al. (2017) J. Immunol. 198(1 Suppl.) 55.13; Jeon et al. (2016) Immune Netw. 16(4): 219-32; and Noack et al. (2014) Autoimmunity Reviews 13(6): 668-77; the contents of each of which are incorporated by reference herein). For example, autoimmune diseases include, but are not limited to, rheumatoid arthritis (RA), juvenile idiopathic arthritis, rheumatoid spondylitis, ankylosing spondylitis, osteoarthritis, gouty arthritis, psoriatic arthritis, juvenile rheumatoid arthritis, type I diabetes (T1D), multiple sclerosis (MS), mixed connective tissue disorder, graft versus host disease (GVHD), autoimmune uveitis, nephritis, psoriasis, systemic lupus erythematosus (SLE), herpetic stromal keratitis (HSK), asthma, Crohn's disease, ulcerative colitis, spondylarthritis, active axial spondyloarthritis (active axSpA) and non-radiographic axial spondyloarthritis (nr-axSpA), pemphigus vulgaris, bullous pemphigoid, membranous glomerulonephritis, neuromyelitis optica, autoimmune encephalomyelitis, autoimmune hepatitis, chronic inflammatory demyelinating polyradiculoneuropathy, dermatomyositis, giant cell arteritis, granulomatosis with polyangiitis, Kawasaki disease, lupus nephritis, polyarteritis nodosa, pyoderma gangrenosum, and Takayasu's arteritis. Autoimmune diseases may be diagnosed using blood tests, cerebrospinal fluid analysis, electromyogram (measures muscle function), and magnetic resonance imaging of the brain, but antibody testing in the blood, for self-antibodies (or auto-antibodies) is particularly useful. Usually, IgG class antibodies are associated with autoimmune diseases.

### I. Engineered Erythroid Cells or Enucleated Cells Including Exogenous Antigen-Pesenting Polypeptides

[0162] The present disclosure features engineered erythroid cells (e.g., engineered enucleated erythroid cells) or enucleated cells (e.g., modified enucleated cells) that are engineered to include wild-type or loadable exogenous antigen-presenting polypeptides. In some embodiments, the engineered erythroid cells or enucleated cells provided herein comprise a loadable exogenous antigen-presenting polypeptide on the cell surface which comprises one or more amino acid substitutions which stabilize the loadable exogenous antigen-presenting polypeptide on the cell surface. In some embodiments, the loadable exogenous antigen-presenting polypeptide is stabilized on the cell surface in the absence of a polypeptide bound to (e.g., to the antigen-binding cleft of) the exogenous antigen-presenting polypeptide.

[0163] In some embodiments, an exogenous antigenic polypeptide of interest can be selected and loaded onto a wild-type or loadable exogenous antigen-presenting polypeptide present on an engineered erythroid or enucleated cell described herein prior to administration to a subject, thus allowing for customizable therapy specific to the particular subject.

[0164] In some embodiments, the loadable exogenous antigen-presenting polypeptide comprises a displaceable polypeptide bound to the loadable exogenous antigen-presenting polypeptide. In some embodiments, the displaceable polypeptide can be replaced with a selected exogenous antigenic polypeptide of interest prior to administration to a subject.

[0165] The skilled artisan would appreciate, based upon the disclosure provided herein, that numerous immunoregulatory molecules can be used to produce an almost limitless variety of engineered erythroid cells (e.g., engineered enucleated erythroid cells) or enucleated cells (e.g., modified enucleated cells) once armed with the teachings provided herein. That is, there is extensive knowledge in the art regarding the events and molecules involved in activation and induction of immune cells, e.g., activation of T regulatory cells, or inhibition of suppression of immune cells, e.g., natural killer (NK) cells, T cells, B cells, macrophages, and/or DCs.

[0166] In some aspects, the present disclosure provides an engineered erythroid cell (e.g., engineered enucleated erythroid cell) or enucleated cell (e.g., modified enucleated cell) comprising an exogenous polypeptide (e.g., presenting the exogenous polypeptide on the cell surface). Exogenous polypeptides include, but are not limited to, wild-type exogenous antigen-presenting polypeptides, loadable exogenous antigen-presenting polypeptides, exogenous antigenic polypeptides, exogenous displaceable polypeptides, exogenous costimulatory polypeptides, exogenous coinhibitory polypeptides, and exogenous Treg costimulatory polypeptides.

### Exogenous Antigen-Presenting Polypeptides

[0167] In one aspect, the disclosure provides engineered erythroid cells or enucleated cels including a loadable exogenous antigen-presenting polypeptide. Loadable exogenous antigen-presenting polypeptides of the present disclosure include polypeptides comprising human leukocyte antigen (HLA) class I and HLA class II polypeptides comprising one or more amino acid substitutions as compared to the corresponding wild-type exogenous antigen-presenting polypeptide, which stabilize the loadable exogenous antigen-presenting polypeptide on the cell surface, e.g., in the absence of a bound exogenous polypeptide.

[0168] In some embodiments, a wild-type or loadable exogenous antigen-presenting polypeptide, as described herein is bound to an exogenous antigenic polypeptide. In other embodiments, the loadable exogenous antigen-presenting polypeptide is bound to an exogenous displaceable polypeptide. In other embodiments, the exogenous displaceable polypeptide is removed and replaced with an exogenous antigenic polypeptide, and the loadable exogenous antigen-presenting polypeptide maintains a stable conformation on the cell surface.

[0169] HLA class I polypeptides are heterodimers that consist of two polypeptide chains, an a chain and a β2-microglobulin (β2M) chain. The HLA class I a chains consist of a single polypeptide composed of three extracellular domains named α1, α2, and α3, a transmembrane domain that anchors it in the plasma membrane, and a short intracytoplasmic tail. The β2M chain is a single polypeptide non-covalently bound to the a chain. Only the a chain is polymorphic and encoded by an HLA gene, while the β2m subunit is not polymorphic and encoded by the β2M gene. HLA class I polypeptides have β2 subunits and can only be recognized by CD8 co-receptors. As used herein, HLA class I polypeptides include HLA-A, HLA-B, HLA-C, HLA-E and HLA-G.

[0170] In some embodiments, the wild-type or loadable exogenous antigen-presenting polypeptide comprises a HLA a heavy chain polypeptide and a β2M polypeptide, or a fragment thereof. In some embodiments, the HLA a heavy chain comprises one or more HLAa heavy domains (e.g., one or more of the alphal, alpha2, and alpha3 domains).

[0171] In some embodiments of the present disclosure, the wild-type or loadable exogenous antigen-presenting polypeptide comprises a HLA class I polypeptide and includes a signal sequence. In some embodiments, the HLA heavy chain polypeptide is derived from an HLA class I polypeptide. In some embodiments, the wild-type or loadable exogenous antigen-presenting polypeptide is derived from a class I HLA polypeptide, and does not include a signal sequence. In some embodiments, the wild-type or loadable exogenous antigen-presenting polypeptide comprises an ectodomain from a class I HLA polypeptide. In some embodiments, the wild-type or loadable exogenous antigen-presenting polypeptide comprises one or more of the alphal, alpha2, and alpha3 domains from a class I HLA polypeptide.

[0172] HLA class II polypeptides are also heterodimers that consist of an a and 13 polypeptide chain. The subdesignation of chains as e.g., α1, α2, and β1 and β2, refers to separate domains (or subunits) within the HLA α gene and β polypepide. CD4 binds to the β2 region. As used herein, HLA class II polypeptides include HLA-DPα, HLA-DPβ, HLA-DMA, HLA-DMB, HLA DOA, HLA DOB, HLA DQα, HLA DQβ, HLA DRα, and HLA DRβ.

[0173] In some embodiments, the wild-type or loadable exogenous antigen-presenting polypeptide comprises a HLA class II polypeptide and includes a signal sequence. In some embodiments, the HLA heavy chain polypeptide is derived from an HLA class II polypeptide. In some embodiments, the wild-type or loadable exogenous antigen-presenting polypeptide is derived from a HLA class II polypeptide, and does not include a signal sequence. In some embodiments, the wild-type or loadable exogenous antigen-presenting polypeptide comprises an ectodomain from a HLA class II polypeptide. In some embodiments, the wild-type or loadable exogenous antigen-presenting polypeptide comprises one or more of the α1 domain and α2 domain from a HLA class II a chain. In some embodiments, the wild-type or loadable exogenous antigen-presenting polypeptide comprises one or more of the β1 domain and β2 domain from a HLA class IIβ chain. In some embodiments, the wild-type or loadable exogenous antigen-presenting polypeptide comprises one or more of the α1 domain and α2 domain from a HLA class II a chain, and one or more of the β1 domain and β2 domain from a HLA class II β chain.

[0174] The wild-type or loadable exogenous antigen-presenting polypeptides of the present disclosure can include subunits of a cell surface complex or cell surface molecule, e.g., a HLA class I or HLA class II polypeptide, and bind to an exogenous antigenic polypeptide. In some embodiments, the wild-type or loadable exogenous antigen-presenting polypeptides include subunits of HLA class II polypeptides, and a bind to an exogenous antigenic polypeptide. In some embodiments, the wild-type or loadable exogenous antigen-presenting polypeptides include subunits of HLA class I and bind to an exogenous antigenic polypeptide. In some embodiments, the exogenous antigen-presenting polypeptide comprises a leader (signal) sequence. In some embodiments, the exogenous antigen-presenting polypeptide does not comprise a leader (i.e., signal) sequence. In some embodiments, a leader sequence is fused to a wild-type or loadable exogenous antigen-presenting polypeptide (e.g., including a HLA class I or HLA class II polypeptide lacking its leader (i.e., signal sequence)). In some embodiments, the exogenous wild-type or loadable antigen-presenting polypeptide is a fusion polypeptide comprising a leader sequence and a HLA class I polypeptide. In some embodiments, the exogenous wild-type or loadable antigen-presenting polypeptide is a fusion polypeptide comprising a leader sequence and a HLA class II polypeptide. In some embodiments, the leader sequence is selected from the sequences set forth in Table 1.

TABLE 1
Leader Sequences

| SEQ ID | | |
|---|---|---|
| NO: | Sequence Description | Amino Acid Sequence |
| 6 | β2m leader sequence | MSRSVALAVLALLSLSGLEA |
| 7 | GPA signal peptide | MYGKIIFVLLLSEIVSISA |

[0175] In some embodiments, a wild-type or loadable exogenous antigen-presenting polypeptide comprises one or more of alpha domains 1-3 of an HLA class I polypeptide and a β2m polypeptide, or fragments or variants thereof. In some embodiments, a wild-type or loadable exogenous antigen-presenting polypeptide comprises the transmembrane domain of a Type I membrane protein (e.g., GPA), the ectodomain of an HLA class I polypeptide, and a β2m polypeptide. In some embodiments, a wild-type or loadable exogenous antigen-presenting polypeptide comprises the transmembrane domain of a Type I membrane protein (e.g., GPA), the following extracellular domains of an HLA class I polypeptide: alpha domain 1, alpha domain 2, and alpha domain 3, and a β2m polypeptide. In some embodiments, a wild-type or loadable exogenous antigen-presenting polypeptide comprises the transmembrane domain of a Type I membrane protein (e.g., GPA), an HLA class I polypeptide that has been truncated to exclude both the native transmembrane domain and the native cytosolic region, and further includes a β2m polypeptide.

[0176] In some embodiments a wild-type or loadable exogenous antigen-presenting polypeptide comprises a HLA class II α chain, or fragments thereof (e.g., one or more of alpha domains 1 and 2), and a HLA class II β chain, or fragments thereof (e.g., one or more of beta domains 1 and 2), or fragments or variants thereof. In some embodiments, a wild-type or loadable exogenous antigen presenting polypeptide comprises the transmembrane domain of a Type I membrane protein (e.g., GPA), the ectodomain of an HLA class II α chain (e.g., one or more of alpha domains 1 and 2), and the ectodomain of an HLA class II β chain (e.g., one or more of beta domains 1 and 2). In some embodiments, a wild-type or loadable exogenous antigen presenting polypeptide comprises the transmembrane domain of a Type I membrane protein (e.g., GPA), an HLA class II α chain that has been truncated to exclude both the native transmembrane domain and the native cytosolic region, and an HLA class II β chain that has been truncated to exclude both the native transmembrane domain and the native cytosolic region.

[0177] In some embodiments, the engineered erythroid cell (e.g., engineered enucleated erythroid cell) or enucleated cell (e.g., modified enucleated cell) comprises a wild-type or loadable antigen-presenting polypeptide fused to an exogenous antigenic polypeptide (e.g., as a single-chain construct).

[0178] In some embodiments, the engineered erythroid cell (e.g., engineered enucleated erythroid cell) or enucleated cell (e.g., modified enucleated cell) comprises a wild-type or loadable antigen-presenting polypeptide fused to an exogenous displaceable polypeptide.

[0179] In some embodiments, the wild-type or loadable exogenous antigen-presenting polypeptide comprises both an HLA class I α chain and a β2M polypeptide. In some embodiments, the wild-type or loadable exogenous antigen-presenting polypeptide comprises only an HLA class I α chain. In some embodiments, the wild-type or loadable exogenous antigen-presenting polypeptide comprises only a β2M polypeptide. In some embodiments, the wild-type or loadable exogenous antigen-presenting polypeptide comprises both an HLA class I α chain and a β2M polypeptide, and the HLA class I α chain and β2m polypeptide are non-covalently attached. In some embodiments, the wild-type or loadable exogenous antigen-presenting polypeptide comprises both an HLA class I α chain and a β2M polypeptide, and the HLA class I α chain and β2m polypeptide are covalently attached or fused. In some embodiments, the wild-type or loadable exogenous antigen-presenting polypeptide comprises an exogenous antigenic polypeptide linked to an HLA class I a chain. In some embodiments, the wild-type or loadable exogenous antigen-presenting polypeptide comprises an exogenous antigenic polypeptide linked to a β2M polypeptide. In some embodiments, the wild-type or loadable exogenous antigen-presenting polypeptide comprises an exogenous antigenic polypeptide linked to a β2M polypeptide, which is linked to a HLA class I α chain.

[0180] In some embodiments, the wild-type or loadable exogenous antigen-presenting polypeptide comprises both a HLA class II α chain and a HLA class II β chain. In some embodiments, the wild-type or loadable exogenous antigen-presenting polypeptide comprises only a HLA class II α chain. In some embodiments, the wild-type or loadable exogenous antigen-presenting polypeptide comprises only a HLA class II β chain. In some embodiments, the wild-type or loadable exogenous antigen-presenting polypeptide comprises both a HLA class II α chain and a HLA class II β chain, and the HLA class II α chain and HLA class II β chain are non-covalently attached. In some embodiments, the wild-type or loadable exogenous antigen-presenting polypeptide comprises both a HLA class II α chain and a HLA class II β chain, and the HLA class II α chain and HLA class II β chain are covalently attached or fused. In some embodiments, the wild-type or loadable exogenous antigen-presenting polypeptide comprises an exogenous antigenic polypeptide linked to a HLA class II α chain. In some embodiments, the wild-type or loadable exogenous antigen-presenting polypeptide comprises an exogenous antigenic polypeptide linked to a HLA class II β chain. In some embodiments, the wild-type or loadable exogenous antigen-presenting polypeptide comprises an exogenous antigenic polypeptide linked to a HLA class II β-chain, which is linked to a HLA class II α-chain.

[0181] In some embodiments, the wild-type or loadable exogenous antigen-presenting polypeptide comprises an anchor or transmembrane domain. In some embodiments, the the wild-type or loadable exogenous antigen-presenting polypeptide comprises an anchor or transmembrane domain from a Type I membrane protein. In some embodiments, the wild-type or loadable exogenous antigen-presenting polypeptide comprises an HLA class I polypeptide that does not comprise a native transmembrane domain nor a native cytosolic region, and instead comprises a non-native transmembrane domain (e.g., the transmembrane domain of a Type I membrane protein). In some embodiments, the wild-type or loadable exogenous antigen-presenting polypeptide comprises an HLA class II α chain and an HLA class II β chain, each of which lack a native transmembrane domain and/or a native cytosolic region, and instead the the wild-type or loadable exogenous antigen-presenting polypeptide comprises a non-native transmembrane domain (e.g., the transmembrane domain of a Type I membrane protein). In some embodiments, the wild-type or loadable exogenous antigen-presenting polypeptide comprises a transmembrane domain from a Type I membrane protein selected from glycophorin A (GPA); glycophorin B (GPB); Basigin (also known as CD147); CD44; CD58 (also known as LFA3); Intercellular Adhesion Molecule 4 (ICAM4); Basal Cell Adhesion Molecule (BCAM); CR1; CD99; Erythroblast Membrane Associated Protein (ERMAP); junctional adhesion molecule A (JAM-A); neuroplastin (NPTN); AMIGO2; and DS Cell Adhesion Molecule Like 1 (DSCAML1). In some embodiments, the Type 1 membrane protein comprises GPA. In some embodiments, the transmembrane domain is a glycophorin anchor, and in particular GPA, or a fragment thereof. In some embodiments, the transmembrane domain comprises an amino acid sequence listed in Table 2.

TABLE 2
Transmembrane Domain Sequences

| SEQ | | | |
|---|---|---|---|
| ID | Sequence | Sequence | |
| NO: | name | description | Amino acid sequence |
| 8 | GPA | Full length GPA | MYGKIIFVLLLSAIVSISALSTTEVAMHT |
| | | | STSSSVTKSYISSQTNDTHKRDTYAATP |
| | | | RAHEVSEISVRTVYPPEEETGERVQLAH |
| | | | HFSEPEITLIIFGVMAGVIGTILLISYGIRR |
| | | | LIKKSPSDVKPLPSPDTDVPLSSVEIENP |
| | | | ETSDQ |
| 9 | GPA | Fragment of | LSTTEVAMHTSTSSSVTKSYISSQTNDT |
| | | GPA comprising | HKRDTYAATPRAHEVSEISVRTVYPPEE |
| | | a transmembrane | ETGERVQLAHHFSEPEITLIIFGVMAGVI |
| | | domain | GTILLISYGIRRLIKKSPSDVKPLPSPDTD |
| | | | VPLSSVEIENPETSDQ |

[0182] In some embodiments, the wild-type or loadable exogenous antigen-presenting polypeptide comprises a HLA class I or HLA class II polypeptide (or fragment thereof) which is connected to a transmembrane domain (e.g., non-endogenous transmembrane domain, e.g., GPA) via a linker. In some embodiments, the linker is disposed between the alpha3 chain of a HLA class I polypeptide and a transmembrane domain. In some embodiments, the linker is a GlySer linker. In some embodiments, the linker is about 18 amino acids in length. In other embodiments, the linker is between about 2 amino acids in length and 30 amino acids in length. In some embodiments, the linker is about 1, 2, 3, 4, 5, 6, 7, 8, 9, 10, 11, 12, 13, 14, 15, 16, 17, 18, 19, 20, 21, 22, 23, 24, 25, 26, 27, 28, 29, or 30 or more amino acids in length. In some embodiments, the linker is a cleavable linker. In some embodiments, the linker is selected from an amino acid sequence listed in Table 3.

[0183] In some embodiments, the wild-type or loadable exogenous antigen-presenting polypeptide comprises a linker disposed between the one or more HLAa heavy chain polypeptide and the β2M polypeptide. In some embodiments, the linker is a GlySer linker. In some embodiments, the linker is about 20 amino acids in length. In other embodiments, the linker is between about 2 amino acids in length and 30 amino acids in length. In some embodiments, the linker is about 2, 3, 4, 5, 6, 7, 8, 9, 10, 11, 12, 13, 14, 15, 16, 17, 18, 19, 20, 21, 22, 23, 24, 25, 26, 27, 28, 29, or 30 or more amino acids in length. In some embodiments, the linker is about 18 amino acid residues in length. In some embodiments, the a linker is a cleavable linker. In some embodiments, the linker is selected from an amino acid sequence listed in Table 3.

TABLE 3
Linker Sequences

| SEQ | Sequence | |
|---|---|---|
| ID | Descrip- | |
| NO: | tion | Amino Acid Sequence |
| 31 | Linker | GGGGSGGGGSGGGGS |
| 10 | Linker | GGGGSGGGGSGGGGSGGGGS |
| 11 | Linker | GSGSGSGSEDGSGSGSGS |
| 12 | Linker | GSGSGSGSGSGSGSGSGS |
| 13 | Linker | GCGGSGGGGSGGGGS |
| 14 | Linker | TGSGGGGSGGGGSGGGGSGGGGSGT |
| 15 | Linker | GGSGGSGGGGGSGGGSGGGSGGGS |
| 16 | Linker | SGRGGGGSGGGGSGGGGSGGGGSSPA |
| 17 | Linker | GGGGSGGGGSGGGGSGGGGSGGGG |
| 18 | Snorkel | SGRGASSGSSGSGSQKKPRYEIRWKVVVISAILALV |
| | linker | VLTVISLIILIMLWGSGMQSPA (“snorkel |
| | | linker”) |

[0184] In some embodiments, an exogenous antigenic polypeptide or an exogenous displaceable polypeptide is connected to the wild-type or loadable exogenous antigen-presenting polypeptide via a linker. In some embodiments, the linker is about 15 amino acids in length. In other embodiments, the linker is between about 10 amino acids in length and 30 amino acids in length. In some embodiments, the linker is about 10, 11, 12, 13, 14, 15, 16, 17, 18, 19, 20, 21, 22, 23, 24, 25, 26, 27, 28, 29, or 30 or more amino acids in length.

[0185] In some embodiments, an enzymatic cleavage site is disposed in the linker connecting the wild-type or loadable exogenous antigen-presenting polypeptide and the exogenous antigenic polypeptide or exogenous displaceable polypeptide. In some embodiments, the cleavage site can be used to free the exogenous displaceable polypeptide (e.g., upon displacement from the HLA polypeptide). In other embodiments, the cleavage site can expose, upon cleavage, an N-terminal amino acid sequence that can be used to conjugate a moiety (e.g., a click handle) or a peptide. In some embodiments, the enzymatic cleavage site is a human rhinovirus (HRV) 3C protease cleavage site. In some embodiments, the enzymatic cleavage site comprises the amino acid sequence LEVLFQ/GP (SEQ ID NO: 1), wherein the backslash indicates the cleavage site. In some embodiments, the enzymatic cleavage site is a tobacco etch virus (TEV) protease cleavage site. In some embodiments, the enzymatic cleavage site comprises the amino acid sequence ENLYFQ/G (SEQ ID NO: 2), wherein the backslash indicates the cleavage site.

[0186] In some embodiments, the enzymatic cleavage site is within 10 amino acids or less from a GGG motif in the linker, and is located between the GGG motif and a displaceable polypeptide. In some embodiments, the GGG motif is C terminal to the enzymatic cleavage site. In some embodiments, the enzymatic cleavage site is within 10 amino acids or less from an LPTXG motif (SEQ ID NO: 3), and is located between the LPTXG motif (SEQ ID NO: 3) and a displaceable polypeptide. In some embodiments, the LPTXG motif (SEQ ID NO: 3) is C terminal to the enzymatic cleavage site.

[0187] In some embodiments, the enzymatic cleavage site is adjacent to a SpyTag sequence (AHIVMVDAYKPTK (SEQ ID NO: 4)), and is located between the SpyTag sequence and the displaceable polypeptide. In some embodiments, the SpyTag sequence is C terminal to the enzymatic cleavage site. In some embodiments, the enzymatic cleavage site is within 10 amino acids or less from the amino acid sequence AHIVMVDAYKPTK (SEQ ID NO: 4).

[0188] In some embodiments, the enzymatic cleavage site is adjacent to a KTag sequence (ATHIKFSKRD (SEQ ID NO: 5)), and is located between the KTag sequence and a displaceable polypeptide. In some embodiments, the KTag sequence is C terminal to the enzymatic cleavage site. In some embodiments, the enzymatic cleavage site is within 10 amino acids or less from the amino acid sequence ATHIKFSKRD (SEQ ID NO: 5).

[0189] In some embodiments, a loadable exogenous antigen-presenting polypeptide provided herein comprises one or more amino acid substitutions which stabilize the loadable exogenous antigen-presenting polypeptide on the cell surface. In some embodiments, the loadable exogenous antigen-presenting polypeptide is stabilized on the cell surface of a cell (e.g., an engineered erythroid cell or an enucleated cell comprising the loadable exogenous antigen-presenting polypeptide) in the absence of a polypeptide (e.g., an exogenous antigenic polypeptide or an exogenous displaceable polypeptide) bound to (e.g., to the antigen-binding cleft of) the loadable exogenous antigen-presenting polypeptide.

[0190] In some embodiments, an exogenous antigenic polypeptide or an exogenous displacebale polypeptide is loaded on the antigen-binding cleft of a wild-type or loadable exogenous antigen-presenting polypeptide described herein. In some embodiments, the exogenous antigenic polypeptide or exogenous displaceable polypeptide is presented on a wild-type or loadable exogenous antigen-presenting polypeptide, e.g., the exogenous antigenic polypeptide or exogenous displaceable polypeptide is bound to the wild-type or loadable exogenous antigen-presenting polypeptide. The exogenous antigenic polypeptide or exogenous displaceable polypeptide may be attached either covalently or non-covalently to the wild-type or loadable exogenous antigen-presenting polypeptide. In some embodiments, the exogenous antigenic polypeptide or exogenous displaceable polypeptide is free, and can be bound to the wild-type or loadable exogenous antigen-presenting polypeptide present on cell surface of an engineered erythroid cell (e.g., engineered enucleated erythroid cell) or enucleated cell (e.g., modified enucleated cell). In some embodiments, coupling reagents can be used to link (e.g., covalently attach) an exogenous polypeptide or exogenous displaceable polypeptide to a wild-type or loadable exogenous antigen-presenting polypeptide present on the cell surface.

[0191] In some embodiments, click chemistry, as described in detail herein, can be used to link an exogenous antigenic polypeptide or a exogenous displaceable polypeptide to a wild-type or loadable exogenous antigen-presenting polypeptide present on the cell surface.

[0192] Multiple assays for assessing binding affinity and/or determining whether an exogenous antigenic polypeptide or exogenous displaceable polypeptide specifically binds to (or is specifically bound to) a particular ligand (e.g., a wild-type or loadable exogenous antigen-presenting polypeptide) are known in the art. For example, surface plasmon resonance (Biacore®) can be used to determine the binding constant of a complex between two polypeptides. In this assay, the dissociation constant for the complex can be determined by monitoring changes in the refractive index with respect to time as buffer is passed over the chip. Other suitable assays for measuring the binding of one polypeptide to another include, for example, immunoassays such as enzyme linked immunosorbent assays (ELISA) and radioimmunoassays (RIA), or determination of binding by monitoring the change in the spectroscopic or optical properties of the proteins using fluorescence, UV absorption, circular dichroism, or nuclear magnetic resonance (NMR). Other exemplary assays include, but are not limited to, Western blot, analytical ultracentrifugation, and spectroscopy (see, e.g., Scatchard et al. (1949) Ann. N.Y. Acad. Sci. 51:660; Wilson (2002) Science 295: 2103; Woffi et al. (1993) Cancer Res. 53: 2560-5; U.S. Pat. Nos. 5,283,173 and 5,468,614; and International Patent Publication No. WO 2018/005559). Alternatively, binding of a polypeptide to a particular ligand (e.g., a wild-type or loadable exogenous antigen-presenting polypeptide) may be determined using a predictive algorithm. For example, methods for predicting HLA class II and class II epitopes are well known in the art, and include TEPITOPE (see, e.g., Meister et al. (1995) Vaccine 13: 581-91), EpiMatrix (De Groot et al. (1997) AIDS Res Hum Retroviruses 13: 529-31), the Predict Method (Yu et al. (2002) Mol. Med. 8: 137-48), the SYFPEITHI epitope prediction algorithm (Schuler et al. (2007) Methods Mol Biol. 409: 75-93, and Rankpep (Reche et al. (2002) Hum. Immunol. 63(9): 701-9). Additional algorithms for predicting HLA class I and class II epitopes are described, for example, in Kessler and Melief (2007) Leukemia 21(9): 1859-74.

[0193] In some embodiments, a wild-type or loadable exogenous antigen-presenting polypeptide comprises a HLA-A, a HLA-B, a HLA-C, a HLA-E, a HLA-G, a HLA-DRB1, a HLA-DQA1, a HLA-DQB1, a HLA-DPA1, and/or a HLA-DPB1 polypeptide, or a fragment thereof, and is capable of binding to an exogenous antigenic polypeptide and of displaying it on a cell surface.

[0194] Some exemplary contructs comprising the wild-type or loadable exogenous antigen-presenting polypeptides are described in FIGS. 2A and 2B.

[0195] In some embodiments, the wild-type or loadable exogenous antigen-presenting polypeptide comprises an HLA class I polypeptide (or a fragment thereof), and optionally a β2M polypeptide, wherein the HLA class I polypeptide is a HLA-A polypeptide. In some embodiments, the HLA-A polypeptide comprises a HLA-A allele selected from the group consisting of A*01:01, A*02:01, A *03:01, A*24:02, A*11:01, A*29:02, A*32:01, A*68:01, A*31:01, A*25:01, A*26:01, A*23:01, and A*30:01. In some embodiments, the HLA-A polypeptide is linked to an exogenous antigenic polypeptide or an exogenous displaceable polypeptide as a single chain fusion polypeptide. In some embodiments, the single chain fusion polypeptide includes a transmembrane domain (e.g., a transmembrane domain set forth in Table 2). In some embodiments, the single chain fusion polypeptide comprises an HLA-A polypeptide that does not comprise a native transmembrane domain nor a native cytosolic region, and instead comprises a non-native transmembrane domain (e.g., the transmembrane domain of a Type I membrane protein). In some embodiments, the single chain fusion polypeptide includes a linker (e.g., between an exogenous antigenic polypeptide or an exogenous displaceable polypeptide and a β2M polypeptide, between a β2M polypeptide and a HLA-A α chain (or fragment thereof), or between a HLA-A α chain (or fragment thereof) and a transmembrane domain). In some embodiments, the linker is selected from a sequence set forth in Table 3. In some embodiments, the single chain fusion polypeptide includes a leader sequence (e.g., a linker sequence set forth in Table 1). In some embodiments, a HLA-A leader sequence is fused to a wild-type or loadable exogenous antigen-presenting polypeptide provided herein that comprises a transmembrane domain.

[0196] In some embodiments, the wild-type or loadable exogenous antigen-presenting polypeptide comprises an HLA class I polypeptide (or a fragment thereof), and optionally a (32M polypeptide, wherein the HLA class I polypeptide is a HLA-B polypeptide. In some embodiments, the HLA-B polypeptide comprises a HLA-B allele selected from the group consisting of B*08:01, B*07:02, B*44:02, B*15:01, B*40:01, B*44:03, B*35:01, B*51:01, B*27:05, B*57:01, B*18:01, B*14:02, B*13:02, B*55:01, B*14:01, B*49:01, B*37:01, B*38:01, B*39:01, B*35:03, and B*40:02. In some embodiments, the HLA-B polypeptide is linked to an exogenous antigenic polypeptide or an exogenous displaceable polypeptide as a single chain polypeptide. In some embodiments, the single chain fusion polypeptide includes a transmembrane domain (e.g., a transmembrane domain set forth in Table 2). In some embodiments, the single chain fusion comprises an HLA-B polypeptide that does not comprise a native transmembrane domain nor a native cytosolic region, and instead comprises a non-native transmembrane domain (e.g., the transmembrane domain of a Type I membrane protein). In some embodiments, the single chain fusion polypeptide includes a linker (e.g., between an exogenous antigenic polypeptide or an exogenous displaceable polypeptide and a β2M polypeptide, between a β2M polypeptide and a HLA-B α chain (or fragment thereof), or between a HLA-B α chain (or a fragment thereof) and a transmembrane domain). In some embodiments, the linker is selected from a sequence set forth in Table 3. In some embodiments, the single chain fusion polypeptide includes a leader sequence (e.g., a leader sequence set forth in Table 1). In some embodiments, a HLA-B leader sequence is fused to a wild-type or loadable exogenous antigen-presenting polypeptide provided herein that comprises a transmembrane domain.

[0197] In some embodiments, the wild-type or loadable exogenous antigen-presenting polypeptide comprises an HLA class I polypeptide (or a fragment thereof), and optionally a β2M polypeptide, wherein the HLA class I polypeptide is a HLA-C polypeptide. In some embodiments, the HLA-C polypeptide comprises a HLA-C allele selected from the group consisting of C*07:01, C*07:02, C*05:01, C*06:02, C*04:01, C*03:04, C*03:03, C*02:02, C*16:01, C*08:02, C*12:03, C*01:02, C*15:02, C*07:04, and C*14:02. In some embodiments, the HLA-C polypeptide is linked to an exogenous antigenic polypeptide or an exogenous displaceable polypeptide as a single chain fusion polypeptide. In some embodiments, the single chain fusion polypeptide includes a transmembrane domain (e.g., a transmembrane domain set forth in Table 2). In some embodiments, the single chain fusion comprises an HLA-C polypeptide that does not comprise a native transmembrane domain nor a native cytosolic region, and instead comprises a non-native transmembrane domain (e.g., the transmembrane domain of a Type I membrane protein). In some embodiments, the single chain fusion polypeptide includes a linker (e.g., between an exogenous antigenic polypeptide or an exogenous displaceable polypeptide and a β2M polypeptide, between a β2M polypeptide and HLA-C α chain (or fragment thereof), or between a HLA-C α chain (or fragment thereof) and a transmembrane domain). In some embodiments, the linker is selected from a sequence set forth in Table 3. In some embodiments, the single chain fusion polypeptide includes a leader sequence (e.g., a leader sequence set forth in Table 1). In some embodiments, a HLA-C leader sequence is fused to a wild-type or loadable exogenous antigen-presenting polypeptide described herein that comprises a transmembrane domain.

[0198] In some embodiments, the wild-type or loadable exogenous antigen-presenting polypeptide comprises an HLA class I polypeptide (or a fragment thereof), and optionally a β2M polypeptide, wherein the HLA class I polypeptide is a HLA-E polypeptide. In some embodiments, the HLA-E polypeptide comprises a HLA-E allele is E*01:01:01:01, E*01:01:01:02, E*01:01:01:03, E*01:01:01:04, E*01:01:01:05, E*01:01:01:06, E*01:01:01:07, E*01:01:01:08, E*01:01:01:09, E*01:01:01:10, E*01:01:02, E*01:03:01:01, E*01:03:01:02, E*01:03:01:03, E*01:03:01:04, E*01:03:02:01, E*01:03:02:02, E*01:03:03, E*01:03:04, E*01:03:05, E*01:04, E*01:05, E*01:06, E*01:07, E*01:08N, E*01:09 or E*01:10 allele. In some embodiments, the HLA-E polypeptide is linked to an exogenous antigenic polypeptide or an exogenous displaceable polypeptide as a single chain fusion polypeptide. In some embodiments, the single chain fusion polypeptide includes a transmembrane domain (e.g.,a transmembrane domain set forth in Table 2). In some embodiments, the single chain fusion polypeptide comprises an HLA-E polypeptide that does not comprise a native transmembrane domain nor a native cytosolic region, and instead comprises a non-native transmembrane domain (e.g., the transmembrane domain of a Type I membrane protein). In some embodiments, the single chain fusion polypeptide includes a linker (e.g., between an exogenous antigenic polypeptide or an exogenous displaceable polypeptide and a β2M polyepeptide, between a β2M polypeptide and a HLA-E α chain (or fragment thereof), or between a HLA-E α chain (or fragment thereof) and a transmembrane domain). In some embodiments, the linker is selected from a sequence set forth in Table 3. In some embodiments, the HLA-E single chain fusion polypeptide includes a leader sequence. In some embodiments, the leader sequence is selected from a sequence set forth in Table 1. In some embodiments, an HLA-E leader sequence is fused to a wild-type or loadable exogenous antigen-presenting polypeptide described herein that comprises a transmembrane domain.

[0199] In some embodiments, the wild-type or loadable exogenous antigen-presenting polypeptide comprises an HLA class I polypeptide (or fragment thereof), and optionally a β2M polypeptide, wherein the HLA class I polypeptide is a HLA-G polypeptide. In some embodiments, the HLA-G polypeptide is selected from the group consisting of: HLA-G1, HLA-G2, HLA-G3, HLA-G4, HLA-G5, HLA-G6, and HLA-G7. In some embodiments, the HLA-G is an HLA-G multimer, e.g., a dimer. In some embodiments, the HLA-G polypeptide comprises a HLA-G allele selected from G*01:01:01:01, G*01:01:01:02, G*01:01:01:03, G*01:01:01:04, G*01:01:01:05, G*01:01:01:06, G*01:01:01:07, G*01:01:01:08, G*01:01:02:01, G*01:01:02:02, G*01:01:03:01, G*01:01:03:02, G*01:01:03:03, G*01:01:03:04, G*01:01:04, G*01:01:05, G*01:01:06, G*01:01:07, G*01:01:08, G*01:01:09, G*01:01:11, G*01:01:12, G*01:01:13, G*01:01:14, G*01:01:15, G*01:01:16, G*01:01:17, G*01:01:18, G*01:01:19, G*01:01:20, G*01:01:21, G*01:01:22, G*01:02, G*01:03:01:01, G*01:03:01:02, G*01:04:01:01, G*01:04:01:02, G*01:04:02, G*01:04:03, G*01:04:04, G*01:04:05, G*01:04:06, G*01:05N, G*01:06, G*01:07, G*01:08:01, G*01:08:02, G*01:09, G*01:10 and G*01:11. In some embodiments, the HLA-G polypeptide comprises an unpaired cysteine at residue 42. In some embodiments, the HLA-G polypeptide is linked to an exogenous antigenic polypeptide or an exogenous displaceable polypeptide as a single chain fusion polypeptide. In some embodiments, the single chain fusion polypeptide includes a transmembrane domain (e.g., a transmembrane domain set forth in Table 2). In some embodiments, the single chain fusion comprises an HLA-G polypeptide that does not comprise a native transmembrane domain nor a native cytosolic region, and instead comprises a non-native transmembrane domain (e.g., the transmembrane domain of a Type I membrane protein). In some embodiments, the single chain fusion polypeptide includes a linker (e.g., between an exogenous antigenic polypeptide or an exogenous displaceable polypeptide and a β2M polypeptide, between a β2M polypeptide and a HLA-G α chain (or fragment thereof), or between a HLA-G α chain (or fragment thereof) and a transmembrane domain). In some embodiments, the single chain fusion polypeptide includes a leader sequence (e.g., a leader sequence set forth in Table 1). In some embodiments, an HLA-G leader sequence is fused to a wild-type or loadable exogenous antigen-presenting polypeptide described herein that comprises a transmembrane domain.

[0200] In some embodiments, the wild-type or loadable exogenous antigen-presenting polypeptide comprises at least one (e.g., one, two or three) HLA class II polypeptide(s), or a fragment(s) thereof, selected from a HLA-DPα, a HLA-DPβ, a HLA-DMA, HLA-DMB, a HLA DOA, a HLA-DOB, a HLA-DQα, a HLA-DQβ, a HLA-DRα, and a HLA-DRβ polypeptide, or a fragment thereof. In some embodiments, the wild-type or loadable exogenous antigen-presenting polypeptide comprises either: a HLA-DPα polypeptide, or a fragment thereof, and a HLA-DPβ polypeptide, or a fragment thereof, a HLA-DMA polypeptide, or a fragment thereof, and a HLA-DMB polypeptide, or a fragment thereof; a HLA DOA polypeptide, or a fragment thereof, and a HLA-DOB polypeptide, or a fragment thereof; a HLA-DQα polypeptide, or a fragment thereof, and a HLA-DQβ polypeptide, or a fragment thereof; or a HLA-DRα polypeptide, or a fragment thereof, and a HLA-DRβ polypeptide, or a fragment thereof. In some embodiments, the HLA-DPα polypeptide comprises an allele selected from DPA1*01:03, DPA1*02:01, and DPA1*02:07. In some embodiments, the HLA-DPβ polypeptide comprises an allele selected from DPB1*04:01, DPB1*02:01, DPB1*04:02, DPB1*03:01, DPB1*01:01, DPB1*11:01, DPB1*05:01, DPB1*10:01, DPB1*06:01, DPB1*13:01, DPB1*14:01, and DPB1*17:01. In some embodiments, the HLA-DQα polypeptide comprises an allele selected from DQA1*05:01, DQA1*05:03, DQA1*05:05, DQA1*03:01, DQA1*03:02, DQA1*03:03, DQA1*01:02, DQA1*02:01, DQA1*01:01, DQA1*01:03, DQA1*01:04, DQA1*04:01, and DQA1*06:01. In some embodiments, the HLA-DQβ polypeptide comprises an allele selected from DQB1*03:01, DQB1*02:01, DQB1*06:01, DQB1*06:02, DQB1*06:03, DQB1*05:01, DQB1*05:02, DQB1*02:02, DQB1*03:02, DQB1*06:03, DQB1*03:03, DQB1*03:04, DQB1*06:04, DQB1*06:09, DQB1*05:03, DQB1*05:04, and DQB1*04:02. In some embodiments, the HLA-DRβ polypeptide comprises an allele selected from the group consisting of DRB1*07:01, DRB1*03:01, DRB1*15:01, DRB1*04:01, DRB1*01:01, DRB1*13:01, DRB1*11:01, DRB1*04:04, DRB1*13:02, DRB1*08:01, DRB1*12:01, DRB1*11:04, DRB1*09:01, DRB1*14:01, DRB1*04:07, and DRB1*14:04. In some embodiments, the wild-type or loadable exogenous antigen-presenting polypeptide comprises a HLA-DQα polypeptide, or a fragment thereof, and a HLA-DQβ polypeptide, or a fragment thereof, wherein the HLA-DQα polypeptide and the HLA-DQβ polypeptide comprise the following allele combinations, represented as HLA-DQα allele: HLA-DQβ allele: DQA1*05:01:DQB1*2:01; DQA1*2:01:DQB1*2:02; DQA1*03:02:DQB1*2:02; DQA1*3:01:DQB1*4:02; DQA1*03:02:DQB1*4:02; DQA1*4:01:DQB1*4:02; DQA1*1:01:DQB1*5:01; DQA1*1:02:DQB1*5:01; DQA1*1:03:DQB1*5:01; DQA1*1:04:DQB1*5:01; DQA1*1:02:DQB1*5:02; DQA1*1:03:DQB1*5:02; DQA1*1:04:DQB1*5:03; DQA1*1:02:DQB1*5:04; DQA1*1:03:DQB1*6:01; DQA1*1:02:DQB1*6:02; DQA1*1:03:DQB1*6:02; DQA1*1:04:DQB1*6:02; DQA1*1:02:DQB1*6:03; DQA1*1:03:DQB1*6:03; DQA1*1:02:DQB1*6:04; DQA1*1:02:DQB1*6:09; DQA1*2:01:DQB1*3:01; DQA1*3:01:DQB1*3:01; DQA1*03:03:DQB1*3:01; DQA1*3:01:DQB1*3:04; DQA1*03:02:DQB1*3:04; DQA1*4:01:DQB1*3:01; DQA1*05:05:DQB1*3:01; DQA1*6:01:DQB1*3:01; DQA1*3:01:DQB1*3:02; DQA1*03:02:DQB1*3:02; DQA1*2:01:DQB1*3:03; DQA1*03:01:DQB1*03:02; DQA1*03:02:DQB1*03:02; DQA1*04:01:DQB1*03:02; DQA1*05:03:DQB1*03:02 and DQA1*3:02:DQB1*3:03. In some embodiments, the HLA class II polypeptide(s) is linked to an exogenous antigenic polypeptide or an exogenous displaceable polypeptide as a single chain fusion polypeptide. In some embodiments, the single chain fusion polypeptide comprises HLA class II polypeptides that do not comprise a native transmembrane domain nor a native cytosolic domain, and instead the single chain fusion polypeptide comprises a non-native transmembrane domain (e.g., the transmembrane domain of a Type I membrane protein). In some embodiments, the single chain fusion polypeptide includes a linker (e.g., between an exogenous antigenic polypeptide or an exogenous displaceable polypeptide and a HLA class II polypeptide (or fragment thereof), between a first HLA class II polypeptide (or fragment thereof) and a second HLA class II polypeptide (or fragment thereof), or between a HLA class II polypeptide and a transmembrane domain). In some embodiments, the linker is a linker sequence set forth in Table 3. In some embodiments, the single chain fusion polypeptide includes a leader sequence (e.g., a leader sequence set forth in Table 1). In some embodiments, an HLA class II polypeptide leader sequence is fused to a wild-type or loadable exogenous antigen-presenting polypeptide described herein that comprises a transmembrane domain.

[0201] In some embodiments, the wild-type or loadable exogenous antigen-presenting polypeptide comprises an HLA class II alpha chain (or fragment thereof) and an HLA class II beta chain (or fragment thereof), each of which lack a native transmembrane domain and/or a native cytosolic region, and instead the wild-type or loadable exogenous antigen-presenting polypeptide comprises a non-native transmembrane domain (e.g., the transmembrane domain of a Type I membrane protein. In some embodiments, the transmembrane domain is selected from a sequence set forth in Table 2. In some embodiments, the wild-type or loadable exogenous antigen-presenting polypeptide comprises includes a linker (e.g., a linker sequence set forth in Table 3. In some embodiments, the wild-type or loadable exogenous antigen-presenting polypeptide comprisesinclude a leader sequence (e.g. a leader sequence set forth in Table 1).

[0202] In some embodiments, a wild-type or loadable exogenous antigen-presenting polypeptide comprises an HLA allele polypeptide comprising or consisting of an amino acid sequence set forth in Table 4. It will be readily understood by those of skill in the art that loadable exogenous antigen-presenting polypeptides can include an amino acid sequence set forth Table 4 modified to include one or more amino acid substitutions set forth herein. In some embodiments, the HLA allele polypeptide comprises a signal peptide. In other embodiments, the HLA allele polypeptide does not include a signal peptide. Accordingly, in some embodiments, the wild-type or loadable exogenous antigen-presenting polypeptide comprises the amino acid sequence of any one of the sequences, shown in Table 4, excluding the signal peptide amino acid sequence (shown underlined in the sequences in Table 4). In other embodiments, the wild-type or loadable exogenous antigen-presenting polypeptide comprises the amino acid sequence of any one of the sequences shown in Table 4 including the signal peptide amino acid sequence (shown underlined in Table 4).

TABLE 4
HLA Alleles

| | | |
|---|---|---|
| (SEQ ID | A*01: 01 | MAVMAPRTLLLLLSGALALTQTWAGSHSMRYFF |
| NO: 19) | (IMGT/HLA | TSVSRPGRGEPRFIAVGYVDDTQFVRFDSDAASQ |
| | Accession No. | KMEPRAPWIEQEGPEYWDQETRNMKAHSQTDR |
| | HLA00001) | ANLGTLRGYYNQSEDGSHTIQIMYGCDVGPDGR |
| | * Predicted signal | FLRGYRQDAYDGKDYIALNEDLRSWTAADMAA |
| | peptide underlined | QITKRKWEAVHAAEQRRVYLEGRCVDGLRRYL |
| | | ENGKETLQRTDPPKTHMTHHPISDHEATLRCWA |
| | | LGFYPAEITLTWQRDGEDQTQDTELVETRPAGD |
| | | GTFQKWAAVVVPSGEEQRYTCHVQHEGLPKPLT |
| | | LRWELSSQPTIPIVGIIAGLVLLGAVITGAVVAAV |
| | | MWRRKSSDRKGGSYTQAASSDSAQGSDVSLTAC |
| | | KV |
| (SEQ ID | A*02: 01 | MAVMAPRTLVLLLSGALALTQTWAGSHSMRYF |
| NO: 20) | (IMGT/HLA | FTSVSRPGRGEPRFIAVGYVDDTQFVRFDSDAAS |
| | Accession No. | QRMEPRAPWIEQEGPEYWDGETRKVKAHSQTH |
| | HLA00005) | RVDLGTLRGYYNQSEAGSHTVQRMYGCDVGSD |
| | * Predicted signal | WRFLRGYHQYAYDGKDYIALKEDLRSWTAADM |
| | peptide underlined | AAQTTKHKWEAAHVAEQLRAYLEGTCVEWLRR |
| | | YLENGKETLQRTDAPKTHMTHHAVSDHEATLRC |
| | | WALSFYPAEITLTWQRDGEDQTQDTELVETRPA |
| | | GDGTFQKWAAVVVPSGQEQRYTCHVQHEGLPK |
| | | PLTLRWEPSSQPTIPIVGIIAGLVLFGAVITGAVVA |
| | | AVMWRRKSSDRKGGSYSQAASSDSAQGSDVSLT |
| | | ACKV |
| (SEQ ID | A*03: 01 | MAVMAPRTLLLLLSGALALTQTWAGSHSMRYFF |
| NO: 21) | (IMGT/HLA | TSVSRPGRGEPRFIAVGYVDDTQFVRFDSDAASQ |
| | Accession No. | RMEPRAPWIEQEGPEYWDQETRNVKAQSQTDR |
| | HLA00037) | VDLGTLRGYYNQSEAGSHTIQIMYGCDVGSDGR |
| | * Predicted signal | FLRGYRQDAYDGKDYIALNEDLRSWTAADMAA |
| | peptide underlined | QITKRKWEAAHEAEQLRAYLDGTCVEWLRRYL |
| | | ENGKETLQRTDPPKTHMTHHPISDHEATLRCWA |
| | | LGFYPAEITLTWQRDGEDQTQDTELVETRPAGD |
| | | GTFQKWAAVVVPSGEEQRYTCHVQHEGLPKPLT |
| | | LRWELSSQPTIPIVGIIAGLVLLGAVITGAVVAAV |
| | | MWRRKSSDRKGGSYTQAASSDSAQGSDVSLTAC |
| | | KV |
| (SEQ ID | A*24: 02 | MAVMAPRTLVLLLSGALALTQTWAGSHSMRYF |
| NO: 22) | (IMGT/HLA | STSVSRPGRGEPRFIAVGYVDDTQFVRFDSDAAS |
| | Accession No. | QRMEPRAPWIEQEGPEYWDEETGKVKAHSQTDR |
| | HLA00050) | ENLRIALRYYNQSEAGSHTLQMMFGCDVGSDGR |
| | * Predicted signal | FLRGYHQYAYDGKDYIALKEDLRSWTAADMAA |
| | peptide underlined | QITKRKWEAAHVAEQQRAYLEGTCVDGLRRYL |
| | | ENGKETLQRTDPPKTHMTHHPISDHEATLRCWA |
| | | LGFYPAEITLTWQRDGEDQTQDTELVETRPAGD |
| | | GTFQKWAAVVVPSGEEQRYTCHVQHEGLPKPLT |
| | | LRWEPSSQPTVPIVGIIAGLVLLGAVITGAVVAAV |
| | | MWRRNSSDRKGGSYSQAASSDSAQGSDVSLTAC |
| | | KV |
| (SEQ ID | A*11: 01 | MAVMAPRTLLLLLSGALALTQTWAGSHSMRYF |
| NO: 23) | (IMGT/HLA | YTSVSRPGRGEPRFIAVGYVDDTQFVRFDSDAAS |
| | Accession No. | QRMEPRAPWIEQEGPEYWDQETRNVKAQSQTD |
| | HLA00043) | RVDLGTLRGYYNQSEDGSHTIQIMYGCDVGPDG |
| | * Predicted signal | RFLRGYRQDAYDGKDYIALNEDLRSWTAADMA |
| | peptide underlined | AQITKRKWEAAHAAEQQRAYLEGRCVEWLRRY |
| | | LENGKETLQRTDPPKTHMTHHPISDHEATLRCW |
| | | ALGFYPAEITLTWQRDGEDQTQDTELVETRPAG |
| | | DGTFQKWAAVVVPSGEEQRYTCHVQHEGLPKPL |
| | | TLRWELSSQPTIPIVGIIAGLVLLGAVITGAVVAA |
| | | VMWRRKSSDRKGGSYTQAASSDSAQGSDVSLT |
| | | ACKV |
| (SEQ ID | A*29: 02 | MAVMAPRTLLLLLLGALALTQTWAGSHSMRYF |
| NO: 24) | (IMGT/HLA | TTSVSRPGRGEPRFIAVGYVDDTQFVRFDSDAAS |
| | Accession No. | QRMEPRAPWIEQEGPEYWDLQTRNVKAQSQTD |
| | HLA00086) | RANLGTLRGYYNQSEAGSHTIQMMYGCDVGSD |
| | * Predicted signal | GRFLRGYRQDAYDGKDYIALNEDLRSWTAADM |
| | peptide underlined | AAQITQRKWEAARVAEQLRAYLEGTCVEWLRR |
| | | YLENGKETLQRTDAPKTHMTHHAVSDHEATLRC |
| | | WALSFYPAEITLTWQRDGEDQTQDTELVETRPA |
| | | GDGTFQKWASVVVPSGQEQRYTCHVQHEGLPK |
| | | PLTLRWEPSSQPTIPIVGIIAGLVLFGAVFAGAVV |
| | | AAVRWRRKSSDRKGGSYSQAASSDSAQGSDMS |
| | | LTACKV |
| (SEQ ID | A*32: 01 | MAVMAPRTLLLLLLGALALTQTWAGSHSMRYF |
| NO: 25) | (IMGT/HLA | FTSVSRPGRGEPRFIAVGYVDDTQFVRFDSDAAS |
| | Accession No. | QRMEPRAPWIEQEGPEYWDQETRNVKAHSQTD |
| | HLA00101) | RESLRIALRYYNQSEAGSHTIQMMYGCDVGPDG |
| | * Predicted signal | RLLRGYQQDAYDGKDYIALNEDLRSWTAADMA |
| | peptide underlined | AQITQRKWEAARVAEQLRAYLEGTCVEWLRRY |
| | | LENGKETLQRTDAPKTHMTHHAVSDHEATLRC |
| | | WALSFYPAEITLTWQRDGEDQTQDTELVETRPA |
| | | GDGTFQKWASVVVPSGQEQRYTCHVQHEGLPK |
| | | PLTLRWEPSSQPTIPIVGIIAGLVLFGAMFAGAVV |
| | | AAVRWRRKSSDRKGGSYSQAASSDSAQGSDMS |
| | | LTACKV |
| (SEQ ID | A*68: 01 | MAVMAPRTLVLLLSGALALTQTWAGSHSMRYF |
| NO: 26) | (IMGT/HLA | YTSVSRPGRGEPRFIAVGYVDDTQFVRFDSDAAS |
| | Accession No. | QRMEPRAPWIEQEGPEYWDRNTRNVKAQSQTD |
| | HLA00115) | RVDLGTLRGYYNQSEAGSHTIQMMYGCDVGSD |
| | * Predicted signal | GRFLRGYRQDAYDGKDYIALKEDLRSWTAADM |
| | peptide underlined | AAQTTKHKWEAAHVAEQWRAYLEGTCVEWLR |
| | | RYLENGKETLQRTDAPKTHMTHHAVSDHEATLR |
| | | CWALSFYPAEITLTWQRDGEDQTQDTELVETRP |
| | | AGDGTFQKWVAVVVPSGQEQRYTCHVQHEGLP |
| | | KPLTLRWEPSSQPTIPIVGIIAGLVLFGAVITGAVV |
| | | AAVMWRRKSSDRKGGSYSQAASSDSAQGSDVS |
| | | LTACKV |
| (SEQ ID | A*31: 01 | MAVMAPRTLLLLLLGALALTQTWAGSHSMRYF |
| NO: 30) | (IMGT/HLA | TTSVSRPGRGEPRFIAVGYVDDTQFVRFDSDAAS |
| | Accession No. | QRMEPRAPWIEQERPEYWDQETRNVKAHSQIDR |
| | HLA00092) | VDLGTLRGYYNQSEAGSHTIQMMYGCDVGSDG |
| | * Predicted signal | RFLRGYQQDAYDGKDYIALNEDLRSWTAADMA |
| | peptide underlined | AQITQRKWEAARVAEQLRAYLEGTCVEWLRRY |
| | | LENGKETLQRTDPPKTHMTHHAVSDHEATLRCW |
| | | ALSFYPAEITLTWQRDGEDQTQDTELVETRPAGD |
| | | GTFQKWASVVVPSGQEQRYTCHVQHEGLPKPLT |
| | | LRWEPSSQPTIPIVGIIAGLVLFGAVFAGAVVAAV |
| | | RWRRKSSDRKGGSYSQAASSDSAQGSDMSLTAC |
| | | KV |
| (SEQ ID | A*25: 01 | MAVMAPRTLVLLLSGALALTQTWAGSHSMRYF |
| NO: 46) | (IMGT/HLA | YTSVSRPGRGEPRFIAVGYVDDTQFVRFDSDAAS |
| | Accession No. | QRMEPRAPWIEQEGPEYWDRNTRNVKAHSQTD |
| | HLA00071) | RESLRIALRYYNQSEDGSHTIQRMYGCDVGPDG |
| | * Predicted signal | RFLRGYQQDAYDGKDYIALNEDLRSWTAADMA |
| | peptide underlined | AQITQRKWETAHEAEQWRAYLEGRCVEWLRRY |
| | | LENGKETLQRTDAPKTHMTHHAVSDHEATLRC |
| | | WALSFYPAEITLTWQRDGEDQTQDTELVETRPA |
| | | GDGTFQKWASVVVPSGQEQRYTCHVQHEGLPK |
| | | PLTLRWEPSSQPTIPIVGIIAGLVLFGAVIAGAVVA |
| | | AVMWRRKSSDRKGGSYSQAASSDSAQGSDMSL |
| | | TACKV |
| (SEQ ID | A*26: 01 | MAVMAPRTLVLLLSGALALTQTWAGSHSMRYF |
| NO: 47) | (IMGT/HLA | YTSVSRPGRGEPRFIAVGYVDDTQFVRFDSDAAS |
| | Accession No. | QRMEPRAPWIEQEGPEYWDRNTRNVKAHSQTD |
| | HLA00073) | RANLGTLRGYYNQSEDGSHTIQRMYGCDVGPDG |
| | * Predicted signal | RFLRGYQQDAYDGKDYIALNEDLRSWTAADMA |
| | peptide underlined | AQITQRKWETAHEAEQWRAYLEGRCVEWLRRY |
| | | LENGKETLQRTDAPKTHMTHHAVSDHEATLRC |
| | | WALSFYPAEITLTWQRDGEDQTQDTELVETRPA |
| | | GDGTFQKWASVVVPSGQEQRYTCHVQHEGLPK |
| | | PLTLRWEPSSQPTIPIVGIIAGLVLFGAVIAGAVVA |
| | | AVMWRRKSSDRKGGSYSQAASSDSAQGSDMSL |
| | | TACKV |
| (SEQ ID | A*23: 01 | MAVMAPRTLVLLLSGALALTQTWAGSHSMRYF |
| NO: 48) | (IMGT/HLA | STSVSRPGRGEPRFIAVGYVDDTQFVRFDSDAAS |
| | Accession No. | QRMEPRAPWIEQEGPEYWDEETGKVKAHSQTDR |
| | HLA00048) | ENLRIALRYYNQSEAGSHTLQMMFGCDVGSDGR |
| | * Predicted signal | FLRGYHQYAYDGKDYIALKEDLRSWTAADMAA |
| | peptide underlined | QITQRKWEAARVAEQLRAYLEGTCVDGLRRYLE |
| | | NGKETLQRTDPPKTHMTHHPISDHEATLRCWAL |
| | | GFYPAEITLTWQRDGEDQTQDTELVETRPAGDG |
| | | TFQKWAAVVVPSGEEQRYTCHVQHEGLPKPLTL |
| | | RWEPSSQPTVHIVGIIAGLVLLGAVITGAVVAAV |
| | | MWRRNSSDRKGGSYSQAASSDSAQGSDVSLTAC |
| | | KV |
| (SEQ ID | A*30: 01 | MAVMAPRTLLLLLSGALALTQTWAGSHSMRYFS |
| NO: 49) | (IMGT/HLA | TSVSRPGSGEPRFIAVGYVDDTQFVRFDSDAASQ |
| | Accession No. | RMEPRAPWIEQERPEYWDQETRNVKAQSQTDRV |
| | HLA00089) | DLGTLRGYYNQSEAGSHTIQIMYGCDVGSDGRF |
| | * Predicted signal | LRGYEQHAYDGKDYIALNEDLRSWTAADMAAQ |
| | peptide underlined | ITQRKWEAARWAEQLRAYLEGTCVEWLRRYLE |
| | | NGKETLQRTDPPKTHMTHHPISDHEATLRCWAL |
| | | GFYPAEITLTWQRDGEDQTQDTELVETRPAGDG |
| | | TFQKWAAVVVPSGEEQRYTCHVQHEGLPKPLTL |
| | | RWELSSQPTIPIVGIIAGLVLLGAVITGAVVAAVM |
| | | WRRKSSDRKGGSYTQAASSDSAQGSDVSLTACK |
| | | V |
| (SEQ ID | C*07: 01 | MRVMAPRALLLLLSGGLALTETWACSHSMRYF |
| NO: 50) | (IMGT/HLA | DTAVSRPGRGEPRFISVGYVDDTQFVRFDSDAAS |
| | Accession No. | PRGEPRAPWVEQEGPEYWDRETQNYKRQAQAD |
| | HLA00433) | RVSLRNLRGYYNQSEDGSHTLQRMYGCDLGPD |
| | * Predicted signal | GRLLRGYDQSAYDGKDYIALNEDLRSWTAADT |
| | peptide underlined | AAQITQRKLEAARAAEQLRAYLEGTCVEWLRRY |
| | | LENGKETLQRAEPPKTHVTHHPLSDHEATLRCW |
| | | ALGFYPAEITLTWQRDGEDQTQDTELVETRPAG |
| | | DGTFQKWAAVVVPSGQEQRYTCHMQHEGLQEP |
| | | LTLSWEPSSQPTIPIMGIVAGLAVLVVLAVLGAV |
| | | VTAMMCRRKSSGGKGGSCSQAACSNSAQGSDES |
| | | LITCKA |
| (SEQ ID | C*07: 02 | MRVMAPRALLLLLSGGLALTETWACSHSMRYF |
| NO: 51) | (IMGT/HLA | DTAVSRPGRGEPRFISVGYVDDTQFVRFDSDAAS |
| | Accession No. | PRGEPRAPWVEQEGPEYWDRETQKYKRQAQAD |
| | HLA00434) | RVSLRNLRGYYNQSEDGSHTLQRMSGCDLGPDG |
| | * Predicted signal | RLLRGYDQSAYDGKDYIALNEDLRSWTAADTA |
| | peptide underlined | AQITQRKLEAARAAEQLRAYLEGTCVEWLRRYL |
| | | ENGKETLQRAEPPKTHVTHHPLSDHEATLRCWA |
| | | LGFYPAEITLTWQRDGEDQTQDTELVETRPAGD |
| | | GTFQKWAAVVVPSGQEQRYTCHMQHEGLQEPL |
| | | TLSWEPSSQPTIPIMGIVAGLAVLVVLAVLGAVV |
| | | TAMMCRRKSSGGKGGSCSQAACSNSAQGSDESL |
| | | ITCKA |
| (SEQ ID | C*05: 01 | MRVMAPRTLILLLSGALALTETWACSHSMRYFY |
| NO: 52) | (IMGT/HLA | TAVSRPGRGEPRFIAVGYVDDTQFVQFDSDAASP |
| | Accession No. | RGEPRAPWVEQEGPEYWDRETQKYKRQAQTDR |
| | HLA00427) | VNLRKLRGYYNQSEAGSHTLQRMYGCDLGPDG |
| | * Predicted signal | RLLRGYNQFAYDGKDYIALNEDLRSWTAADKA |
| | peptide underlined | AQITQRKWEAAREAEQRRAYLEGTCVEWLRRY |
| | | LENGKKTLQRAEHPKTHVTHHPVSDHEATLRCW |
| | | ALGFYPAEITLTWQRDGEDQTQDTELVETRPAG |
| | | DGTFQKWAAVVVPSGEEQRYTCHVQHEGLPEPL |
| | | TLRWGPSSQPTIPIVGIVAGLAVLAVLAVLGAVM |
| | | AVVMCRRKSSGGKGGSCSQAASSNSAQGSDESL |
| | | IACKA |
| (SEQ ID | C*06: 02 | MRVMAPRTLILLLSGALALTETWACSHSMRYFD |
| NO: 53) | (IMGT/HLA | TAVSRPGRGEPRFISVGYVDDTQFVRFDSDAASP |
| | Accession No. | RGEPRAPWVEQEGPEYWDRETQKYKRQAQADR |
| | HLA00430) | VNLRKLRGYYNQSEDGSHTLQWMYGCDLGPDG |
| | * Predicted signal | RLLRGYDQSAYDGKDYIALNEDLRSWTAADTA |
| | peptide underlined | AQITQRKWEAAREAEQWRAYLEGTCVEWLRRY |
| | | LENGKETLQRAEHPKTHVTHHPVSDHEATLRCW |
| | | ALGFYPAEITLTWQRDGEDQTQDTELVETRPAG |
| | | DGTFQKWAAVVVPSGEEQRYTCHVQHEGLPEPL |
| | | TLRWEPSSQPTIPIVGIVAGLAVLAVLAVLGAVM |
| | | AVVMCRRKSSGGKGGSCSQAASSNSAQGSDESL |
| | | IACKA |
| (SEQ ID | C*04: 01 | MRVMAPRTLILLLSGALALTETWAGSHSMRYFS |
| NO: 54) | (IMGT/HLA | TSVSWPGRGEPRFIAVGYVDDTQFVRFDSDAASP |
| | Accession No. | RGEPREPWVEQEGPEYWDRETQKYKRQAQADR |
| | HLA00420) | VNLRKLRGYYNQSEDGSHTLQRMFGCDLGPDG |
| | * Predicted signal | RLLRGYNQFAYDGKDYIALNEDLRSWTAADTA |
| | peptide underlined | AQITQRKWEAAREAEQRRAYLEGTCVEWLRRY |
| | | LENGKETLQRAEHPKTHVTHHPVSDHEATLRCW |
| | | ALGFYPAEITLTWQWDGEDQTQDTELVETRPAG |
| | | DGTFQKWAAVVVPSGEEQRYTCHVQHEGLPEPL |
| | | TLRWKPSSQPTIPIVGIVAGLAVLAVLAVLGAMV |
| | | AVVMCRRKSSGGKGGSCSQAASSNSAQGSDESL |
| | | IACKA |
| (SEQ ID | C*03: 04 | MRVMAPRTLILLLSGALALTETWAGSHSMRYFY |
| NO: 55) | (IMGT/HLA | TAVSRPGRGEPHFIAVGYVDDTQFVRFDSDAASP |
| | Accession No. | RGEPRAPWVEQEGPEYWDRETQKYKRQAQTDR |
| | HLA00413) | VSLRNLRGYYNQSEAGSHIIQRMYGCDVGPDGR |
| | * Predicted signal | LLRGYDQYAYDGKDYIALNEDLRSWTAADTAA |
| | peptide underlined | QITQRKWEAAREAEQLRAYLEGLCVEWLRRYLK |
| | | NGKETLQRAEHPKTHVTHHPVSDHEATLRCWAL |
| | | GFYPAEITLTWQWDGEDQTQDTELVETRPAGDG |
| | | TFQKWAAVVVPSGEEQRYTCHVQHEGLPEPLTL |
| | | RWEPSSQPTIPIVGIVAGLAVLAVLAVLGAVVAV |
| | | VMCRRKSSGGKGGSCSQAASSNSAQGSDESLIAC |
| | | KA |
| (SEQ ID | C*03: 03 | MRVMAPRTLILLLSGALALTETWAGSHSMRYFY |
| NO: 56) | (IMGT/HLA | TAVSRPGRGEPHFIAVGYVDDTQFVRFDSDAASP |
| | Accession No. | RGEPRAPWVEQEGPEYWDRETQKYKRQAQTDR |
| | HLA00411) | VSLRNLRGYYNQSEARSHIIQRMYGCDVGPDGR |
| | * Predicted signal | LLRGYDQYAYDGKDYIALNEDLRSWTAADTAA |
| | peptide underlined | QITQRKWEAAREAEQLRAYLEGLCVEWLRRYLK |
| | | NGKETLQRAEHPKTHVTHHPVSDHEATLRCWAL |
| | | GFYPAEITLTWQWDGEDQTQDTELVETRPAGDG |
| | | TFQKWAAVVVPSGEEQRYTCHVQHEGLPEPLTL |
| | | RWEPSSQPTIPIVGIVAGLAVLAVLAVLGAVVAV |
| | | VMCRRKSSGGKGGSCSQAASSNSAQGSDESLIAC |
| | | KA |
| (SEQ ID | C*02: 02 | MRVMAPRTLLLLLSGALALTETWACSHSMRYFY |
| NO: 57) | (IMGT/HLA | TAVSRPSRGEPHFIAVGYVDDTQFVRFDSDAASP |
| | Accession No. | RGEPRAPWVEQEGPEYWDRETQKYKRQAQTDR |
| | HLA00404) | VNLRKLRGYYNQSEAGSHTLQRMYGCDLGPDG |
| | * Predicted signal | RLLRGYDQSAYDGKDYIALNEDLRSWTAADTA |
| | peptide underlined | AQITQRKWEAAREAEQWRAYLEGECVEWLRRY |
| | | LENGKETLQRAEHPKTHVTHHPVSDHEATLRCW |
| | | ALGFYPTEITLTWQRDGEDQTQDTELVETRPAGD |
| | | GTFQKWAAVVVPSGEEQRYTCHVQHEGLPEPLT |
| | | LRWEPSSQPTIPIVGIVAGLAVLAVLAVLGAVVA |
| | | VVMCRRKSSGGKGGSCSQAASSNSAQGSDESLI |
| | | ACKA |
| (SEQ ID | C*16: 01 | MRVMAPRTLILLLSGALALTETWACSHSMRYFY |
| NO: 58) | (IMGT/HLA | TAVSRPGRGEPRFIAVGYVDDTQFVRFDSDAASP |
| | Accession No. | RGEPRAPWVEQEGPEYWDRETQKYKRQAQTDR |
| | HLA00475) | VSLRNLRGYYNQSEAGSHTLQWMYGCDLGPDG |
| | * Predicted signal | RLLRGYDQSAYDGKDYIALNEDLRSWTAADTA |
| | peptide underlined | AQITQRKWEAARAAEQQRAYLEGTCVEWLRRY |
| | | LENGKETLQRAEHPKTHVTHHLVSDHEATLRCW |
| | | ALGFYPAEITLTWQRDGEDQTQDTELVETRPAG |
| | | DGTFQKWAAVVVPSGEEQRYTCHVQHEGLPEPL |
| | | TLRWEPSSQPTIPIVGIVAGLAVLAVLAVLGAVV |
| | | AVVMCRRKSSGGKGGSCSQAASSNSAQGSDESL |
| | | IACKA |
| (SEQ ID | C*08: 02 | MRVMAPRTLILLLSGALALTETWACSHSMRYFY |
| NO: 59) | (IMGT/HLA | TAVSRPGRGEPRFIAVGYVDDTQFVQFDSDAASP |
| | Accession No. | RGEPRAPWVEQEGPEYWDRETQKYKRQAQTDR |
| | HLA00446) | VSLRNLRGYYNQSEAGSHTLQRMYGCDLGPDG |
| | * Predicted signal | RLLRGYNQFAYDGKDYIALNEDLRSWTAADKA |
| | peptide underlined | AQITQRKWEAAREAEQRRAYLEGTCVEWLRRY |
| | | LENGKKTLQRAEHPKTHVTHHPVSDHEATLRCW |
| | | ALGFYPAEITLTWQRDGEDQTQDTELVETRPAG |
| | | DGTFQKWAAVVVPSGEEQRYTCHVQHEGLPEPL |
| | | TLRWGPSSQPTIPIVGIVAGLAVLAVLAVLGAVM |
| | | AVVMCRRKSSGGKGGSCSQAASSNSAQGSDESL |
| | | IACKA |
| (SEQ ID | C*12: 03 | MRVMAPRTLILLLSGALALTETWACSHSMRYFY |
| NO: 60) | (IMGT/HLA | TAVSRPGRGEPRFIAVGYVDDTQFVRFDSDAASP |
| | Accession No. | RGEPRAPWVEQEGPEYWDRETQKYKRQAQADR |
| | HLA00455) | VSLRNLRGYYNQSEAGSHTLQWMYGCDLGPDG |
| | * Predicted signal | RLLRGYDQSAYDGKDYIALNEDLRSWTAADTA |
| | peptide underlined | AQITQRKWEAAREAEQWRAYLEGTCVEWLRRY |
| | | LENGKETLQRAEHPKTHVTHHPVSDHEATLRCW |
| | | ALGFYPAEITLTWQRDGEDQTQDTELVETRPAG |
| | | DGTFQKWAAVVVPSGEEQRYTCHVQHEGLPEPL |
| | | TLRWEPSSQPTIPIVGIVAGLAVLAVLAVLGAVM |
| | | AVVMCRRKSSGGKGGSCSQAASSNSAQGSDESL |
| | | IACKA |
| (SEQ ID | C*01: 02 | MRVMAPRTLILLLSGALALTETWACSHSMKYFF |
| NO: 61) | (IMGT/HLA | TSVSRPGRGEPRFISVGYVDDTQFVRFDSDAASP |
| | Accession No. | RGEPRAPWVEQEGPEYWDRETQKYKRQAQTDR |
| | HLA00401) | VSLRNLRGYYNQSEAGSHTLQWMCGCDLGPDG |
| | * Predicted signal | RLLRGYDQYAYDGKDYIALNEDLRSWTAADTA |
| | peptide underlined | AQITQRKWEAAREAEQRRAYLEGTCVEWLRRY |
| | | LENGKETLQRAEHPKTHVTHHPVSDHEATLRCW |
| | | ALGFYPAEITLTWQWDGEDQTQDTELVETRPAG |
| | | DGTFQKWAAVMVPSGEEQRYTCHVQHEGLPEP |
| | | LTLRWEPSSQPTIPIVGIVAGLAVLAVLAVLGAV |
| | | VAVVMCRRKSSGGKGGSCSQAASSNSAQGSDES |
| | | LIACKA |
| (SEQ ID | C*15: 02 | MRVMAPRTLLLLLSGALALTETWACSHSMRYFY |
| NO: 62) | (IMGT/HLA | TAVSRPGRGEPHFIAVGYVDDTQFVRFDSDAASP |
| | Accession No. | RGEPRAPWVEQEGPEYWDRETQNYKRQAQTDR |
| | HLA00467) | VNLRKLRGYYNQSEAGSHIIQRMYGCDLGPDGR |
| | * Predicted signal | LLRGHDQLAYDGKDYIALNEDLRSWTAADTAA |
| | peptide underlined | QITQRKWEAAREAEQLRAYLEGTCVEWLRRYLE |
| | | NGKETLQRAEHPKTHVTHHPVSDHEATLRCWAL |
| | | GFYPAEITLTWQRDGEDQTQDTELVETRPAGDG |
| | | TFQKWAAVVVPSGEEQRYTCHVQHEGLPEPLTL |
| | | RWEPSSQPTIPIVGIVAGLAVLAVLAVLGAVMAV |
| | | VMCRRKSSGGKGGSCSQAASSNSAQGSDESLIAC |
| | | KA |
| (SEQ ID | C*07: 04 | MRVMAPRALLLLLSGGLALTETWACSHSMRYF |
| NO: 63) | (IMGT/HLA | DTAVSRPGRGEPRFISVGYVDDTQFVRFDSDAAS |
| | Accession No. | PRGEPRAPWVEQEGPEYWDRETQKYKRQAQAD |
| | HLA00406) | RVSLRNLRGYYNQSEDGSHTFQRMYGCDLGPDG |
| | * Predicted signal | RLLRGYDQFAYDGKDYIALNEDLRSWTAADTA |
| | peptide underlined | AQITQRKLEAARAAEQDRAYLEGTCVEWLRRYL |
| | | ENGKKTLQRAEPPKTHVTHHPLSDHEATLRCWA |
| | | LGFYPAEITLTWQRDGEDQTQDTELVETRPAGD |
| | | GTFQKWAAVVVPSGQEQRYTCHMQHEGLQEPL |
| | | TLSWEPSSQPTIPIMGIVAGLAVLVVLAVLGAVV |
| | | TAMMCRRKSSGGKGGSCSQAACSNSAQGSDESL |
| | | ITCKA |
| (SEQ ID | C*14: 02 | MRVMAPRTLILLLSGALALTETWACSHSMRYFS |
| NO: 64) | (IMGT/HLA | TSVSRPGRGEPRFIAVGYVDDTQFVRFDSDAASP |
| | Accession No. | RGEPRAPWVEQEGPEYWDRETQKYKRQAQTDR |
| | HLA00462) | VSLRNLRGYYNQSEAGSHTLQWMFGCDLGPDG |
| | * Predicted signal | RLLRGYDQSAYDGKDYIALNEDLRSWTAADTA |
| | peptide underlined | AQITQRKWEAAREAEQRRAYLEGTCVEWLRRY |
| | | LENGKETLQRAEHPKTHVTHHPVSDHEATLRCW |
| | | ALGFYPAEITLTWQWDGEDQTQDTELVETRPAG |
| | | DGTFQKWAAVVVPSGEEQRYTCHVQHEGLPEPL |
| | | TLRWEPSSQPTIPIVGIVAGLAVLAVLAVLGAVV |
| | | AVVMCRRKSSGGKGGSCSQAASSNSAQGSDESL |
| | | IACKA |
| (SEQ ID | B*08: 01 | MLVMAPRTVLLLLSAALALTETWAGSHSMRYF |
| NO: 65) | (IMGT/HLA | DTAMSRPGRGEPRFISVGYVDDTQFVRFDSDAAS |
| | Accession No. | PREEPRAPWIEQEGPEYWDRNTQIFKTNTQTDRE |
| | HLA00146) | SLRNLRGYYNQSEAGSHTLQSMYGCDVGPDGRL |
| | * Predicted signal | LRGHNQYAYDGKDYIALNEDLRSWTAADTAAQI |
| | peptide underlined | TQRKWEAARVAEQDRAYLEGTCVEWLRRYLEN |
| | | GKDTLERADPPKTHVTHHPISDHEATLRCWALG |
| | | FYPAEITLTWQRDGEDQTQDTELVETRPAGDRTF |
| | | QKWAAVVVPSGEEQRYTCHVQHEGLPKPLTLR |
| | | WEPSSQSTVPIVGIVAGLAVLAVVVIGAVVAAV |
| | | MCRRKSSGGKGGSYSQAACSDSAQGSDVSLTA |
| (SEQ ID | B*07: 02 | MLVMAPRTVLLLLSAALALTETWAGSHSMRYF |
| NO: 66) | (IMGT/HLA | YTSVSRPGRGEPRFISVGYVDDTQFVRFDSDAAS |
| | Accession No. | PREEPRAPWIEQEGPEYWDRNTQIYKAQAQTDR |
| | HLA00132) | ESLRNLRGYYNQSEAGSHTLQSMYGCDVGPDGR |
| | * Predicted signal | LLRGHDQYAYDGKDYIALNEDLRSWTAADTAA |
| | peptide underlined | QITQRKWEAAREAEQRRAYLEGECVEWLRRYLE |
| | | NGKDKLERADPPKTHVTHHPISDHEATLRCWAL |
| | | GFYPAEITLTWQRDGEDQTQDTELVETRPAGDR |
| | | TFQKWAAVVVPSGEEQRYTCHVQHEGLPKPLTL |
| | | RWEPSSQSTVPIVGIVAGLAVLAVVVIGAVVAAV |
| | | MCRRKSSGGKGGSYSQAACSDSAQGSDVSLTA |
| (SEQ ID | B*44: 02 | MRVTAPRTLLLLLWGAVALTETWAGSHSMRYF |
| NO: 67) | (IMGT/HLA | YTAMSRPGRGEPRFITVGYVDDTLFVRFDSDATS |
| | Accession No. | PRKEPRAPWIEQEGPEYWDRETQISKTNTQTYRE |
| | HLA00318) | NLRTALRYYNQSEAGSHIIQRMYGCDVGPDGRL |
| | * Predicted signal | LRGYDQDAYDGKDYIALNEDLSSWTAADTAAQI |
| | peptide underlined | TQRKWEAARVAEQDRAYLEGLCVESLRRYLEN |
| | | GKETLQRADPPKTHVTHHPISDHEVTLRCWALG |
| | | FYPAEITLTWQRDGEDQTQDTELVETRPAGDRTF |
| | | QKWAAVVVPSGEEQRYTCHVQHEGLPKPLTLR |
| | | WEPSSQSTVPIVGIVAGLAVLAVVVIGAVVAAV |
| | | MCRRKSSGGKGGSYSQAACSDSAQGSDVSLTA |
| (SEQ ID | B*15: 01 | MRVTAPRTVLLLLSGALALTETWAGSHSMRYFY |
| NO: 68) | (IMGT/HLA | TAMSRPGRGEPRFIAVGYVDDTQFVRFDSDAASP |
| | Accession No. | RMAPRAPWIEQEGPEYWDRETQISKTNTQTYRES |
| | HLA00162) | LRNLRGYYNQSEAGSHTLQRMYGCDVGPDGRL |
| | * Predicted signal | LRGHDQSAYDGKDYIALNEDLSSWTAADTAAQI |
| | peptide underlined | TQRKWEAAREAEQWRAYLEGLCVEWLRRYLEN |
| | | GKETLQRADPPKTHVTHHPISDHEATLRCWALG |
| | | FYPAEITLTWQRDGEDQTQDTELVETRPAGDRTF |
| | | QKWAAVVVPSGEEQRYTCHVQHEGLPKPLTLR |
| | | WEPSSQSTIPIVGIVAGLAVLAVVVIGAVVATVM |
| | | CRRKSSGGKGGSYSQAASSDSAQGSDVSLTA |
| (SEQ ID | B*40: 01 | MRVTAPRTVLLLLSAALALTETWAGSHSMRYFH |
| NO: 69) | (IMGT/HLA | TAMSRPGRGEPRFITVGYVDDTLFVRFDSDATSP |
| | Accession No. | RKEPRAPWIEQEGPEYWDRETQISKTNTQTYRES |
| | HLA00291) | LRNLRGYYNQSEAGSHTLQRMYGCDVGPDGRL |
| | * Predicted signal | LRGHNQYAYDGKDYIALNEDLRSWTAADTAAQI |
| | peptide underlined | SQRKLEAARVAEQLRAYLEGECVEWLRRYLENG |
| | | KDKLERADPPKTHVTHHPISDHEATLRCWALGF |
| | | YPAEITLTWQRDGEDQTQDTELVETRPAGDRTF |
| | | QKWAAVVVPSGEEQRYTCHVQHEGLPKPLTLR |
| | | WEPSSQSTVPIVGIVAGLAVLAVVVIGAVVAAV |
| | | MCRRKSSGGKGGSYSQAACSDSAQGSDVSLTA |
| (SEQ ID | B*44: 03 | MRVTAPRTLLLLLWGAVALTETWAGSHSMRYF |
| NO: 70) | (IMGT/HLA | YTAMSRPGRGEPRFITVGYVDDTLFVRFDSDATS |
| | Accession No. | PRKEPRAPWIEQEGPEYWDRETQISKTNTQTYRE |
| | HLA00319) | NLRTALRYYNQSEAGSHIIQRMYGCDVGPDGRL |
| | * Predicted signal | LRGYDQDAYDGKDYIALNEDLSSWTAADTAAQI |
| | peptide underlined | TQRKWEAARVAEQLRAYLEGLCVESLRRYLENG |
| | | KETLQRADPPKTHVTHHPISDHEVTLRCWALGF |
| | | YPAEITLTWQRDGEDQTQDTELVETRPAGDRTF |
| | | QKWAAVVVPSGEEQRYTCHVQHEGLPKPLTLR |
| | | WEPSSQSTVPIVGIVAGLAVLAVVVIGAVVAAV |
| | | MCRRKSSGGKGGSYSQAACSDSAQGSDVSLTA |
| (SEQ ID | B*35: 01 | MRVTAPRTVLLLLWGAVALTETWAGSHSMRYF |
| NO: 71) | (IMGT/HLA | YTAMSRPGRGEPRFIAVGYVDDTQFVRFDSDAA |
| | Accession No. | SPRTEPRAPWIEQEGPEYWDRNTQIFKTNTQTYR |
| | HLA00237) | ESLRNLRGYYNQSEAGSHIIQRMYGCDLGPDGRL |
| | * Predicted signal | LRGHDQSAYDGKDYIALNEDLSSWTAADTAAQI |
| | peptide underlined | TQRKWEAARVAEQLRAYLEGLCVEWLRRYLEN |
| | | GKETLQRADPPKTHVTHHPVSDHEATLRCWALG |
| | | FYPAEITLTWQRDGEDQTQDTELVETRPAGDRTF |
| | | QKWAAVVVPSGEEQRYTCHVQHEGLPKPLTLR |
| | | WEPSSQSTIPIVGIVAGLAVLAVVVIGAVVATVM |
| | | CRRKSSGGKGGSYSQAASSDSAQGSDVSLTA |
| (SEQ ID | B*51: 01 | MRVTAPRTVLLLLWGAVALTETWAGSHSMRYF |
| NO: 72) | (IMGT/HLA | YTAMSRPGRGEPRFIAVGYVDDTQFVRFDSDAA |
| | Accession No. | SPRTEPRAPWIEQEGPEYWDRNTQIFKTNTQTYR |
| | HLA00344) | ENLRIALRYYNQSEAGSHTWQTMYGCDVGPDG |
| | * Predicted signal | RLLRGHNQYAYDGKDYIALNEDLSSWTAADTA |
| | peptide underlined | AQITQRKWEAAREAEQLRAYLEGLCVEWLRRHL |
| | | ENGKETLQRADPPKTHVTHHPVSDHEATLRCWA |
| | | LGFYPAEITLTWQRDGEDQTQDTELVETRPAGD |
| | | RTFQKWAAVVVPSGEEQRYTCHVQHEGLPKPLT |
| | | LRWEPSSQSTIPIVGIVAGLAVLAVVVIGAVVAT |
| | | VMCRRKSSGGKGGSYSQAASSDSAQGSDVSLTA |
| (SEQ ID | B*27: 05 | MRVTAPRTLLLLLWGAVALTETWAGSHSMRYF |
| NO: 73) | (IMGT/HLA | HTSVSRPGRGEPRFITVGYVDDTLFVRFDSDAAS |
| | Accession No. | PREEPRAPWIEQEGPEYWDRETQICKAKAQTDRE |
| | HLA00225) | DLRTLLRYYNQSEAGSHTLQNMYGCDVGPDGR |
| | * Predicted signal | LLRGYHQDAYDGKDYIALNEDLSSWTAADTAA |
| | peptide underlined | QITQRKWEAARVAEQLRAYLEGECVEWLRRYLE |
| | | NGKETLQRADPPKTHVTHHPISDHEATLRCWAL |
| | | GFYPAEITLTWQRDGEDQTQDTELVETRPAGDR |
| | | TFQKWAAVVVPSGEEQRYTCHVQHEGLPKPLTL |
| | | RWEPSSQSTVPIVGIVAGLAVLAVVVIGAVVAAV |
| | | MCRRKSSGGKGGSYSQAACSDSAQGSDVSLTA |
| (SEQ ID | B*57: 01 | MRVTAPRTVLLLLWGAVALTETWAGSHSMRYF |
| NO: 74) | (IMGT/HLA | YTAMSRPGRGEPRFIAVGYVDDTQFVRFDSDAA |
| | Accession No. | SPRMAPRAPWIEQEGPEYWDGETRNMKASAQT |
| | HLA00381) | YRENLRIALRYYNQSEAGSHIIQVMYGCDVGPD |
| | * Predicted signal | GRLLRGHDQSAYDGKDYIALNEDLSSWTAADTA |
| | peptide underlined | AQITQRKWEAARVAEQLRAYLEGLCVEWLRRY |
| | | LENGKETLQRADPPKTHVTHHPISDHEATLRCW |
| | | ALGFYPAEITLTWQRDGEDQTQDTELVETRPAG |
| | | DRTFQKWAAVVVPSGEEQRYTCHVQHEGLPKPL |
| | | TLRWEPSSQSTVPIVGIVAGLAVLAVVVIGAVVA |
| | | AVMCRRKSSGGKGGSYSQAACSDSAQGSDVSLT |
| | | A |
| (SEQ ID | B*18: 01 | MRVTAPRTLLLLLWGAVALTETWAGSHSMRYF |
| NO: 75) | (IMGT/HLA | HTSVSRPGRGEPRFISVGYVDGTQFVRFDSDAAS |
| | Accession No. | PRTEPRAPWIEQEGPEYWDRNTQISKTNTQTYRE |
| | HLA00213) | SLRNLRGYYNQSEAGSHTLQRMYGCDVGPDGR |
| | * Predicted signal | LLRGHDQSAYDGKDYIALNEDLSSWTAADTAAQ |
| | peptide underlined | ITQRKWEAARVAEQLRAYLEGTCVEWLRRHLEN |
| | | GKETLQRADPPKTHVTHHPISDHEATLRCWALG |
| | | FYPAEITLTWQRDGEDQTQDTELVETRPAGDRTF |
| | | QKWAAVVVPSGEEQRYTCHVQHEGLPKPLTLR |
| | | WEPSSQSTIPIVGIVAGLAVLAVVVIGAVVATVM |
| | | CRRKSSGGKGGSYSQAASSDSAQGSDVSLTA |
| (SEQ ID | B*14: 02 | MLVMAPRTVLLLLSAALALTETWAGSHSMRYF |
| NO: 76) | (IMGT/HLA | YTAVSRPGRGEPRFISVGYVDDTQFVRFDSDAAS |
| | Accession No. | PREEPRAPWIEQEGPEYWDRNTQICKTNTQTDRE |
| | HLA00158) | SLRNLRGYYNQSEAGSHTLQWMYGCDVGPDGR |
| | * Predicted signal | LLRGYNQFAYDGKDYIALNEDLSSWTAADTAAQ |
| | peptide underlined | ITQRKWEAAREAEQLRAYLEGTCVEWLRRHLEN |
| | | GKETLQRADPPKTHVTHHPISDHEATLRCWALG |
| | | FYPAEITLTWQRDGEDQTQDTELVETRPAGDRTF |
| | | QKWAAVVVPSGEEQRYTCHVQHEGLPKPLTLR |
| | | WEPSSQSTVPIVGIVAGLAVLAVVVIGAVVAAV |
| | | MCRRKSSGGKGGSYSQAASSDSAQGSDVSLTA |
| (SEQ ID | B*13: 02 | MRVTAPRTLLLLLWGAVALTETWAGSHSMRYF |
| NO: 77) | (IMGT/HLA | YTAMSRPGRGEPRFITVGYVDDTQFVRFDSDATS |
| | Accession No. | PRMAPRAPWIEQEGPEYWDRETQISKTNTQTYRE |
| | HLA00153) | NLRTALRYYNQSEAGSHTWQTMYGCDLGPDGR |
| | * Predicted signal | LLRGHNQLAYDGKDYIALNEDLSSWTAADTAA |
| | peptide underlined | QITQLKWEAARVAEQLRAYLEGECVEWLRRYLE |
| | | NGKETLQRADPPKTHVTHHPISDHEATLRCWAL |
| | | GFYPAEITLTWQRDGEDQTQDTELVETRPAGDR |
| | | TFQKWAAVVVPSGEEQRYTCHVQHEGLPKPLTL |
| | | RWEPSSQSTVPIVGIVAGLAVLAVVVIGAVVAAV |
| | | MCRRKSSGGKGGSYSQAACSDSAQGSDVSLTA |
| (SEQ ID | B*55: 01 | MRVTAPRTLLLLLWGALALTETWAGSHSMRYF |
| NO: 78) | (IMGT/HLA | YTAMSRPGRGEPRFIAVGYVDDTQFVRFDSDAA |
| | Accession No. | SPREEPRAPWIEQEGPEYWDRNTQIYKAQAQTD |
| | HLA00368) | RESLRNLRGYYNQSEAGSHTWQTMYGCDLGPD |
| | * Predicted signal | GRLLRGHNQLAYDGKDYIALNEDLSSWTAADTA |
| | peptide underlined | AQITQRKWEAAREAEQLRAYLEGTCVEWLRRYL |
| | | ENGKETLQRADPPKTHVTHHPISDHEATLRCWA |
| | | LGFYPAEITLTWQRDGEDQTQDTELVETRPAGD |
| | | RTFQKWAAVVVPSGEEQRYTCHVQHEGLPKPLT |
| | | LRWEPSSQSTIPIVGIVAGLAVLAVVVIGAVVAT |
| | | VMCRRKSSGGKGGSYSQAASSDSAQGSDVSLTA |
| (SEQ ID | B*14: 01 | MLVMAPRTVLLLLSAALALTETWAGSHSMRYF |
| NO: 79) | (IMGT/HLA | YTSVSRPGRGEPRFISVGYVDDTQFVRFDSDAAS |
| | Accession No. | PREEPRAPWIEQEGPEYWDRNTQICKTNTQTDRE |
| | HLA00157) | SLRNLRGYYNQSEAGSHTLQWMYGCDVGPDGR |
| | * Predicted signal | LLRGYNQFAYDGKDYIALNEDLSSWTAADTAAQ |
| | peptide underlined | ITQRKWEAAREAEQLRAYLEGTCVEWLRRHLEN |
| | | GKETLQRADPPKTHVTHHPISDHEATLRCWALG |
| | | FYPAEITLTWQRDGEDQTQDTELVETRPAGDRTF |
| | | QKWAAVVVPSGEEQRYTCHVQHEGLPKPLTLR |
| | | WEPSSQSTVPIVGIVAGLAVLAVVVIGAVVAAV |
| | | MCRRKSSGGKGGSYSQAASSDSAQGSDVSLTA |
| (SEQ ID | B*49: 01 | MRVTAPRTVLLLLSAALALTETWAGSHSMRYFH |
| NO: 80) | (IMGT/HLA | TAMSRPGRGEPRFITVGYVDDTLFVRFDSDATSP |
| | Accession No. | RKEPRAPWIEQEGPEYWDRETQISKTNTQTYREN |
| | HLA00340) | LRIALRYYNQSEAGSHTWQRMYGCDLGPDGRLL |
| | * Predicted signal | RGYNQLAYDGKDYIALNEDLSSWTAADTAAQIT |
| | peptide underlined | QRKWEAAREAEQLRAYLEGLCVEWLRRYLENG |
| | | KETLQRADPPKTHVTHHPISDHEATLRCWALGF |
| | | YPAEITLTWQRDGEDQTQDTELVETRPAGDRTF |
| | | QKWAAVVVPSGEEQRYTCHVQHEGLPKPLTLR |
| | | WEPSSQSTIPIVGIVAGLAVLAVVVIGAVVATVM |
| | | CRRKSSGGKGGSYSQAASSDSAQGSDVSLTA |
| (SEQ ID | B*37: 01 | MRVTAPRTLLLLLWGAVALTETWAGSHSMRYF |
| NO: 81) | (IMGT/HLA | HTSVSRPGRGEPRFISVGYVDDTQFVRFDSDAAS |
| | Accession No. | PRTEPRAPWIEQEGPEYWDRETQISKTNTQTYRE |
| | HLA00265) | DLRTLLRYYNQSEAGSHTIQRMSGCDVGPDGRL |
| | * Predicted signal | LRGYNQFAYDGKDYIALNEDLSSWTAADTAAQI |
| | peptide underlined | TQRKWEAARVAEQDRAYLEGTCVEWLRRYLEN |
| | | GKETLQRADPPKTHVTHHPISDHEATLRCWALG |
| | | FYPAEITLTWQRDGEDQTQDTELVETRPAGDRTF |
| | | QKWAAVVVPSGEEQRYTCHVQHEGLPKPLTLR |
| | | WEPSSQSTIPIVGIVAGLAVLAVVVIGAVVATVM |
| | | CRRKSSGGKGGSYSQAASSDSAQGSDVSLTA |
| (SEQ ID | B*38: 01 | MLVMAPRTVLLLLSAALALTETWAGSHSMRYF |
| NO: 82) | (IMGT/HLA | YTSVSRPGRGEPRFISVGYVDDTQFVRFDSDAAS |
| | Accession No. | PREEPRAPWIEQEGPEYWDRNTQICKTNTQTYRE |
| | HLA00267) | NLRIALRYYNQSEAGSHTLQRMYGCDVGPDGRL |
| | * Predicted signal | LRGHNQFAYDGKDYIALNEDLSSWTAADTAAQI |
| | peptide underlined | TQRKWEAARVAEQLRTYLEGTCVEWLRRYLEN |
| | | GKETLQRADPPKTHVTHHPISDHEATLRCWALG |
| | | FYPAEITLTWQRDGEDQTQDTELVETRPAGDRTF |
| | | QKWAAVVVPSGEEQRYTCHVQHEGLPKPLTLR |
| | | WEPSSQSTVPIVGIVAGLAVLAVVVIGAVVAAV |
| | | MCRRKSSGGKGGSYSQAASSDSAQGSDVSLTA |
| (SEQ ID | B*39: 01 | MLVMAPRTVLLLLSAALALTETWAGSHSMRYF |
| NO: 83) | (IMGT/HLA | YTSVSRPGRGEPRFISVGYVDDTQFVRFDSDAAS |
| | Accession No. | PREEPRAPWIEQEGPEYWDRNTQICKTNTQTDRE |
| | HLA00271) | SLRNLRGYYNQSEAGSHTLQRMYGCDVGPDGR |
| | * Predicted signal | LLRGHNQFAYDGKDYIALNEDLSSWTAADTAAQ |
| | peptide underlined | ITQRKWEAARVAEQLRTYLEGTCVEWLRRYLEN |
| | | GKETLQRADPPKTHVTHHPISDHEATLRCWALG |
| | | FYPAEITLTWQRDGEDQTQDTELVETRPAGDRTF |
| | | QKWAAVVVPSGEEQRYTCHVQHEGLPKPLTLR |
| | | WEPSSQSTVPIVGIVAGLAVLAVVVIGAVVAAV |
| | | MCRRKSSGGKGGSYSQAASSDSAQGSDVSLTA |
| (SEQ ID | B*35: 03 | MRVTAPRTVLLLLWGAVALTETWAGSHSMRYF |
| NO: 84) | (IMGT/HLA | YTAMSRPGRGEPRFIAVGYVDDTQFVRFDSDAA |
| | Accession No. | SPRTEPRAPWIEQEGPEYWDRNTQIFKTNTQTYR |
| | HLA00239) | ESLRNLRGYYNQSEAGSHIIQRMYGCDLGPDGRL |
| | * Predicted signal | LRGHDQFAYDGKDYIALNEDLSSWTAADTAAQI |
| | peptide underlined | TQRKWEAARVAEQLRAYLEGLCVEWLRRYLEN |
| | | GKETLQRADPPKTHVTHHPVSDHEATLRCWALG |
| | | FYPAEITLTWQRDGEDQTQDTELVETRPAGDRTF |
| | | QKWAAVVVPSGEEQRYTCHVQHEGLPKPLTLR |
| | | WEPSSQSTIPIVGIVAGLAVLAVVVIGAVVATVM |
| | | CRRKSSGGKGGSYSQAASSDSAQGSDVSLTA |
| (SEQ ID | B*40: 02 | MRVTAPRTLLLLLWGAVALTETWAGSHSMRYF |
| NO: 85) | (IMGT/HLA | HTSVSRPGRGEPRFITVGYVDDTLFVRFDSDATSP |
| | Accession No. | RKEPRAPWIEQEGPEYWDRETQISKTNTQTYRES |
| | HLA00293) | LRNLRGYYNQSEAGSHTLQSMYGCDVGPDGRLL |
| | * Predicted signal | RGHNQYAYDGKDYIALNEDLRSWTAADTAAQIT |
| | peptide underlined | QRKWEAARVAEQLRAYLEGECVEWLRRYLENG |
| | | KETLQRADPPKTHVTHHPISDHEATLRCWALGF |
| | | YPAEITLTWQRDGEDQTQDTELVETRPAGDRTF |
| | | QKWAAVVVPSGEEQRYTCHVQHEGLPKPLTLR |
| | | WEPSSQSTVPIVGIVAGLAVLAVVVIGAVVAAV |
| | | MCRRKSSGGKGGSYSQAACSDSAQGSDVSLTA |
| (SEQ ID | DRB1*07: 01 | MVCLKLPGGSCMAALTVTLMVLSSPLALAGDTQ |
| NO: 86) | (IMGT/HLA | PRFLWQGKYKCHFFNGTERVQFLERLFYNQEEF |
| | Accession No. | VRFDSDVGEYRAVTELGRPVAESWNSQKDILED |
| | HLA00719) | RRGQVDTVCRHNYGVGESFTVQRRVHPEVTVYP |
| | * Predicted signal | AKTQPLQHHNLLVCSVSGFYPGSIEVRWFRNGQ |
| | peptide underlined | EEKAGVVSTGLIQNGDWTFQTLVMLETVPRSGE |
| | | VYTCQVEHPSVMSPLTVEWRARSESAQSKMLSG |
| | | VGGFVLGLLFLGAGLFIYFRNQKGHSGLQPTGFL |
| | | S |
| (SEQ ID | DRB1*03: 01 | MVCLRLPGGSCMAVLTVTLMVLSSPLALAGDTR |
| NO: 87) | (IMGT/HLA | PRFLEYSTSECHFFNGTERVRYLDRYFHNQEENV |
| | Accession No. | RFDSDVGEFRAVTELGRPDAEYWNSQKDLLEQK |
| | HLA00671) | RGRVDNYCRHNYGVVESFTVQRRVHPKVTVYPS |
| | * Predicted signal | KTQPLQHHNLLVCSVSGFYPGSIEVRWFRNGQEE |
| | peptide underlined | KTGVVSTGLIHNGDWTFQTLVMLETVPRSGEVY |
| | | TCQVEHPSVTSPLTVEWRARSESAQSKMLSGVG |
| | | GFVLGLLFLGAGLFIYFRNQKGHSGLQPRGFLS |
| (SEQ ID | DRB1*15: 01 | MVCLKLPGGSCMTALTVTLMVLSSPLALSGDTR |
| NO: 88) | (IMGT/HLA | PRFLWQPKRECHFFNGTERVRFLDRYFYNQEESV |
| | Accession No. | RFDSDVGEFRAVTELGRPDAEYWNSQKDILEQA |
| | HLA00865) | RAAVDTYCRHNYGVVESFTVQRRVQPKVTVYPS |
| | * Predicted signal | KTQPLQHHNLLVCSVSGFYPGSIEVRWFLNGQEE |
| | peptide underlined | KAGMVSTGLIQNGDWTFQTLVMLETVPRSGEVY |
| | | TCQVEHPSVTSPLTVEWRARSESAQSKMLSGVG |
| | | GFVLGLLFLGAGLFIYFRNQKGHSGLQPTGFLS |
| (SEQ ID | DRB1*04: 01 | MVCLKFPGGSCMAALTVTLMVLSSPLALAGDTR |
| NO: 89) | (IMGT/HLA | PRFLEQVKHECHFFNGTERVRFLDRYFYHQEEY |
| | Accession No. | VRFDSDVGEYRAVTELGRPDAEYWNSQKDLLEQ |
| | HLA00685) | KRAAVDTYCRHNYGVGESFTVQRRVYPEVTVYP |
| | * Predicted signal | AKTQPLQHHNLLVCSVNGFYPGSIEVRWFRNGQ |
| | peptide underlined | EEKTGVVSTGLIQNGDWTFQTLVMLETVPRSGE |
| | | VYTCQVEHPSLTSPLTVEWRARSESAQSKMLSG |
| | | VGGFVLGLLFLGAGLFIYFRNQKGHSGLQPTGFL |
| | | S |
| (SEQ ID | DRB1*01: 01 | MVCLKLPGGSCMTALTVTLMVLSSPLALAGDTR |
| NO: 90) | (IMGT/HLA | PRFLWQLKFECHFFNGTERVRLLERCIYNQEESV |
| | Accession No. | RFDSDVGEYRAVTELGRPDAEYWNSQKDLLEQR |
| | HLA00664) | RAAVDTYCRHNYGVGESFTVQRRVEPKVTVYPS |
| | * Predicted signal | KTQPLQHHNLLVCSVSGFYPGSIEVRWFRNGQEE |
| | peptide underlined | KAGVVSTGLIQNGDWTFQTLVMLETVPRSGEVY |
| | | TCQVEHPSVTSPLTVEWRARSESAQSKMLSGVG |
| | | GFVLGLLFLGAGLFIYFRNQKGHSGLQPTGFLS |
| (SEQ ID | DRB1*13: 01 | MVCLRLPGGSCMAVLTVTLMVLSSPLALAGDTR |
| NO: 91) | (IMGT/HLA | PRFLEYSTSECHFFNGTERVRFLDRYFHNQEENV |
| | Accession No. | RFDSDVGEFRAVTELGRPDAEYWNSQKDILEDE |
| | HLA00797) | RAAVDTYCRHNYGVVESFTVQRRVHPKVTVYPS |
| | * Predicted signal | KTQPLQHHNLLVCSVSGFYPGSIEVRWFRNGQEE |
| | peptide underlined | KTGVVSTGLIHNGDWTFQTLVMLETVPRSGEVY |
| | | TCQVEHPSVTSPLTVEWRARSESAQSKMLSGVG |
| | | GFVLGLLFLGAGLFIYFRNQKGHSGLQPRGFLS |
| (SEQ ID | DRB1*11: 01 | MVCLRLPGGSCMAVLTVTLMVLSSPLALAGDTR |
| NO: 92) | (IMGT/HLA | PRFLEYSTSECHFFNGTERVRFLDRYFYNQEEYV |
| | Accession No. | RFDSDVGEFRAVTELGRPDEEYWNSQKDFLEDR |
| | HLA00751) | RAAVDTYCRHNYGVGESFTVQRRVHPKVTVYPS |
| | * Predicted signal | KTQPLQHHNLLVCSVSGFYPGSIEVRWFRNGQEE |
| | peptide underlined | KTGVVSTGLIHNGDWTFQTLVMLETVPRSGEVY |
| | | TCQVEHPSVTSPLTVEWRARSESAQSKMLSGVG |
| | | GFVLGLLFLGAGLFIYFRNQKGHSGLQPRGFLS |
| (SEQ ID | DRB1*04: 04 | MVCLKFPGGSCMAALTVTLMVLSSPLALAGDTR |
| NO: 93) | (IMGT/HLA | PRFLEQVKHECHFFNGTERVRFLDRYFYHQEEY |
| | Accession No. | VRFDSDVGEYRAVTELGRPDAEYWNSQKDLLEQ |
| | HLA00689) | RRAAVDTYCRHNYGVVESFTVQRRVYPEVTVYP |
| | * Predicted signal | AKTQPLQHHNLLVCSVNGFYPGSIEVRWFRNGQ |
| | peptide underlined | EEKTGVVSTGLIQNGDWTFQTLVMLETVPRSGE |
| | | VYTCQVEHPSLTSPLTVEWRARSESAQSKMLSG |
| | | VGGFVLGLLFLGAGLFIYFRNQKGHSGLQPTGFL |
| | | S |
| (SEQ ID | DRB1*13: 02 | MVCLRLPGGSCMAVLTVTLMVLSSPLALAGDTR |
| NO: 94) | (IMGT/HLA | PRFLEYSTSECHFFNGTERVRFLDRYFHNQEENV |
| | Accession No. | RFDSDVGEFRAVTELGRPDAEYWNSQKDILEDE |
| | HLA00798) | RAAVDTYCRHNYGVGESFTVQRRVHPKVTVYPS |
| | * Predicted signal | KTQPLQHHNLLVCSVSGFYPGSIEVRWFRNGQEE |
| | peptide underlined | KTGVVSTGLIHNGDWTFQTLVMLETVPRSGEVY |
| | | TCQVEHPSVTSPLTVEWRARSESAQSKMLSGVG |
| | | GFVLGLLFLGAGLFIYFRNQKGHSGLQPRGFLS |
| (SEQ ID | DRB1*08: 01 | MVCLRLPGGSCMAVLTVTLMVLSSPLALAGDTR |
| NO: 95) | (IMGT/HLA | PRFLEYSTGECYFFNGTERVRFLDRYFYNQEEYV |
| | Accession No. | RFDSDVGEYRAVTELGRPSAEYWNSQKDFLEDR |
| | HLA00723) | RALVDTYCRHNYGVGESFTVQRRVHPKVTVYPS |
| | * Predicted signal | KTQPLQHHNLLVCSVSGFYPGSIEVRWFRNGQEE |
| | peptide underlined | KTGVVSTGLIHNGDWTFQTLVMLETVPRSGEVY |
| | | TCQVEHPSVTSPLTVEWSARSESAQSKMLSGVG |
| | | GFVLGLLFLGAGLFIYFRNQKGHSGLQPTGFLS |
| (SEQ ID | DRB1*12: 01 | MVCLRLPGGSCMAVLTVTLMVLSSPLALAGDTR |
| NO: 96) | (IMGT/HLA | PRFLEYSTGECYFFNGTERVRLLERHFHNQEELL |
| | Accession No. | RFDSDVGEFRAVTELGRPVAESWNSQKDILEDRR |
| | HLA00789) | AAVDTYCRHNYGAVESFTVQRRVHPKVTVYPSK |
| | * Predicted signal | TQPLQHHNLLVCSVSGFYPGSIEVRWFRNGQEEK |
| | peptide underlined | TGVVSTGLIHNGDWTFQTLVMLETVPRSGEVYT |
| | | CQVEHPSVTSPLTVEWRARSESAQSKMLSGVGG |
| | | FVLGLLFLGAGLFIYFRNQKGHSGLQPRGFLS |
| (SEQ ID | DRB1*11: 04 | MVCLRLPGGSCMAVLTVTLMVLSSPLALAGDTR |
| NO: 97) | (IMGT/HLA | PRFLEYSTSECHFFNGTERVRFLDRYFYNQEEYV |
| | Accession No. | RFDSDVGEFRAVTELGRPDEEYWNSQKDFLEDR |
| | HLA00756) | RAAVDTYCRHNYGVVESFTVQRRVHPKVTVYPS |
| | * Predicted signal | KTQPLQHHNLLVCSVSGFYPGSIEVRWFRNGQEE |
| | peptide underlined | KTGVVSTGLIHNGDWTFQTLVMLETVPRSGEVY |
| | | TCQVEHPSVTSPLTVEWRARSESAQSKMLSGVG |
| | | GFVLGLLFLGAGLFIYFRNQKGHSGLQPRGFLS |
| (SEQ ID | DRB1*09: 01 | MVCLKLPGGSCMAALTVTLMVLSSPLALAGDTQ |
| NO: 98) | (IMGT/HLA | PRFLKQDKFECHFFNGTERVRYLHRGIYNQEENV |
| | Accession No. | RFDSDVGEYRAVTELGRPVAESWNSQKDFLERR |
| | HLA00749) | RAEVDTVCRHNYGVGESFTVQRRVHPEVTVYPA |
| | * Predicted signal | KTQPLQHHNLLVCSVSGFYPGSIEVRWFRNGQEE |
| | peptide underlined | KAGVVSTGLIQNGDWTFQTLVMLETVPRSGEVY |
| | | TCQVEHPSVMSPLTVEWRARSESAQSKMLSGVG |
| | | GFVLGLLFLGAGLFIYFRNQKGHSGLQPTGFLS |
| (SEQ ID | DRB1*14: 01 | MVCLRLPGGSCMAVLTVTLMVLSSPLALAGDTR |
| NO: 99) | (IMGT/HLA | PRFLEYSTSECHFFNGTERVRFLDRYFHNQEEFV |
| | Accession No. | RFDSDVGEYRAVTELGRPAAEHWNSQKDLLERR |
| | HLA00833) | RAEVDTYCRHNYGVVESFTVQRRVHPKVTVYPS |
| | * Predicted signal | KTQPLQHYNLLVCSVSGFYPGSIEVRWFRNGQEE |
| | peptide underlined | KTGVVSTGLIHNGDWTFQTLVMLETVPRSGEVY |
| | | TCQVEHPSVTSPLTVEWRARSESAQSKMLSGVG |
| | | GFVLGLLFLGAGLFIYFRNQKGHSGLQPRGFLS |
| (SEQ ID | DRB 1*04 : 07 | MVCLKFPGGSCMAALTVTLMVLSSPLALAGDTR |
| NO: 100) | (IMGT/HLA | PRFLEQVKHECHFFNGTERVRFLDRYFYHQEEY |
| | Accession No. | VRFDSDVGEYRAVTELGRPDAEYWNSQKDLLEQ |
| | HLA00693) | RRAEVDTYCRHNYGVGESFTVQRRVYPEVTVYP |
| | * Predicted signal | AKTQPLQHHNLLVCSVNGFYPGSIEVRWFRNGQ |
| | peptide underlined | EEKTGVVSTGLIQNGDWTFQTLVMLETVPRSGE |
| | | VYTCQVEHPSLTSPLTVEWRARSESAQSKMLSG |
| | | VGGFVLGLLFLGAGLFIYFRNQKGHSGLQPTGFL |
| | | S |
| (SEQ ID | DRB1*14: 04 | MVCLRLPGGSCMAVLTVTLMVLSSPLALAGDTR |
| NO: 101) | (IMGT/HLA | PRFLEYSTGECYFFNGTERVRFLDRYFHNQEEFV |
| | Accession No. | RFDSDVGEYRAVTELGRPAAEHWNSQKDLLERR |
| | HLA00836) | RAEVDTYCRHNYGVVESFTVQRRVHPKVTVYPS |
| | * Predicted signal | KTQPLQHHNLLVCSVSGFYPGSIEVRWFRNGQEE |
| | peptide underlined | KTGVVSTGLIHNGDWTFQTLVMLETVPRSGEVY |
| | | TCQVEHPSVTSPLTVEWRARSESAQSKMLSGVG |
| | | GFVLGLLFLGAGLFIYFRNQKGHSGLQPRGFLS |
| (SEQ ID | DQA1*05: 01 | MILNKALMLGALALTTVMSPCGGEDIVADHVAS |
| NO: 102) | (IMGT/HLA | YGVNLYQSYGPSGQYTHEFDGDEQFYVDLGRKE |
| | Accession No. | TVWCLPVLRQFRFDPQFALTNIAVLKHNLNSLIK |
| | HLA00613) | RSNSTAATNEVPEVTVFSKSPVTLGQPNILICLVD |
| | * Predicted signal | NIFPPVVNITWLSNGHSVTEGVSETSFLSKSDHSF |
| | peptide underlined | FKISYLTLLPSAEESYDCKVEHWGLDKPLLKHWE |
| | | PEIPAPMSELTETVVCALGLSVGLVGIVVGTVFII |
| | | RGLRSVGASRHQGPL |
| (SEQ ID | DQA1*03: 01 | MILNKALMLGALALTTVMSPCGGEDIVADHVAS |
| NO: 103) | (IMGT/HLA | YGVNLYQSYGPSGQYSHEFDGDEEFYVDLERKE |
| | Accession No. | TVWQLPLFRRFRRFDPQFALTNIAVLKHNLNIVIK |
| | HLA00608) | RSNSTAATNEVPEVTVFSKSPVTLGQPNTLICLVD |
| | * Predicted signal | NIFPPVVNITWLSNGHSVTEGVSETSFLSKSDHSF |
| | peptide underlined | FKISYLTFLPSADEIYDCKVEHWGLDEPLLKHWE |
| | | PEIPTPMSELTETVVCALGLSVGLVGIVVGTVLIIR |
| | | GLRSVGASRHQGPL |
| (SEQ ID | DQA1*01: 02 | MILNKALLLGALALTTVMSPCGGEDIVADHVAS |
| NO: 104) | (IMGT/HLA | CGVNLYQFYGPSGQYTHEFDGDEQFYVDLERKE |
| | Accession No. | TAWRWPEFSKFGGFDPQGALRNMAVAKHNLNI |
| | HLA00602) | MIKRYNSTAATNEVPEVTVFSKSPVTLGQPNTLI |
| | * Predicted signal | CLVDNIFPPVVNITWLSNGQSVTEGVSETSFLSKS |
| | peptide underlined | DHSFFKISYLTFLPSADEIYDCKVEHWGLDQPLL |
| | | KHWEPEIPAPMSELTETVVCALGLSVGLMGIVVG |
| | | TVFIIQGLRSVGASRHQGPL |
| (SEQ ID | DQA1*02: 01 | MILNKALMLGALALTTVMSPCGGEDIVADHVAS |
| NO: 105) | (IMGT/HLA | YGVNLYQSYGPSGQFTHEFDGDEEFYVDLERKE |
| | Accession No. | TVWKLPLFHRLRFDPQFALTNIAVLKHNLNILIKR |
| | HLA00607) | SNSTAATNEVPEVTVFSKSPVTLGQPNTLICLVD |
| | * Predicted signal | NIFPPVVNITWLSNGHSVTEGVSETSFLSKSDHSF |
| | peptide underlined | FKISYLTFLPSADEIYDCKVEHWGLDEPLLKHWE |
| | | PEIPAPMSELTETVVCALGLSVGLVGIVVGTVLII |
| | | RGLRSVGASRHQGPL |
| (SEQ ID | DQA1*01: 01 | MILNKALLLGALALTTVMSPCGGEDIVADHVAS |
| NO: 106) | (IMGT/HLA | CGVNLYQFYGPSGQYTHEFDGDEEFYVDLERKE |
| | Accession No. | TAWRWPEFSKFGGFDPQGALRNMAVAKHNLNI |
| | HLA00601) | MIKRYNSTAATNEVPEVTVFSKSPVTLGQPNTLI |
| | * Predicted signal | CLVDNIFPPVVNITWLSNGQSVTEGVSETSFLSKS |
| | peptide underlined | DHSFFKISYLTFLPSADEIYDCKVEHWGLDQPLL |
| | | KHWEPEIPAPMSELTETVVCALGLSVGLVGIVVG |
| | | TVFIIQGLRSVGASRHQGPL |
| (SEQ ID | DQA1*01: 03 | MILNKALLLGALALTTVMSPCGGEDIVADHVAS |
| NO: 107) | (IMGT/HLA | CGVNLYQFYGPSGQFTHEFDGDEQFYVDLEKKE |
| | Accession No. | TAWRWPEFSKFGGFDPQGALRNMAVAKHNLNI |
| | HLA00604) | MIKRYNSTAATNEVPEVTVFSKSPVTLGQPNTLI |
| | * Predicted signal | CLVDNIFPPVVNITWLSNGHAVTEGVSETSFLSKS |
| | peptide underlined | DHSFFKISYLTFLPSADEIYDCKVEHWGLDQPLL |
| | | KHWEPEIPAPMSELTETVVCALGLSVGLVGIVVG |
| | | TVFIIQGLRSVGASRHQGPL |
| (SEQ ID | DQA1*04: 01 | MILNKALLLGALALTTVMSPCGGEDIVADHVAS |
| NO: 108) | (IMGT/HLA | YGVNLYQSYGPSGQYTHEFDGDEQFYVDLGRKE |
| | Accession No. | TVWCLPVLRQFRFDPQFALTNIAVTKHNLNILIK |
| | HLA00612) | RSNSTAATNEVPEVTVFSKSPVTLGQPNTLICLVD |
| | * Predicted signal | NIFPPVVNITWLSNGHSVTEGVSETSFLSKSDHSF |
| | peptide underlined | FKISYLTFLPSADEIYDCKVEHWGLDEPLLKHWE |
| | | PEIPAPMSELTETVVCALGLSVGLVGIVVGTVFII |
| | | RGLRSVGASRHQGPL |
| (SEQ ID | DQB1*03: 01 | MSWKKALRIPGGLRAATVTLMLAMLSTPVAEGR |
| NO: 109) | (IMGT/HLA | DSPEDFVYQFKAMCYFTNGTERVRYVTRYIYNR |
| | Accession No. | EEYARFDSDVEVYRAVTPLGPPDAEYWNSQKEV |
| | HLA00625) | LERTRAELDTVCRHNYQLELRTTLQRRVEPTVTI |
| | * Predicted signal | SPSRTEALNHHNLLVCSVTDFYPAQIKVRWFRND |
| | peptide underlined | QEETTGVVSTPLIRNGDWTFQILVMLEMTPQHG |
| | | DVYTCHVEHPSLQNPITVEWRAQSESAQSKMLS |
| | | GIGGFVLGLIFLGLGLIIHHRSQKGLLH |
| (SEQ ID | DQB1*02: 01 | MSWKKALRIPGGLRAATVTLMLSMLSTPVAEGR |
| NO: 110) | (IMGT/HLA | DSPEDFVYQFKGMCYFTNGTERVRLVSRSIYNRE |
| | Accession No. | EIVRFDSDVGEFRAVTLLGLPAAEYWNSQKDILE |
| | HLA00622) | RKRAAVDRVCRHNYQLELRTTLQRRVEPTVTISP |
| | * Predicted signal | SRTEALNHHNLLVCSVTDFYPAQIKVRWFRNDQ |
| | peptide underlined | EETAGVVSTPLIRNGDWTFQILVMLEMTPQRGD |
| | | VYTCHVEHPSLQSPITVEWRAQSESAQSKMLSGI |
| | | GGFVLGLIFLGLGLIIHHRSQKGLLH |
| (SEQ ID | DQB1*06: 02 | MSWKKALRIPGDLRVATVTLMLAMLSSLLAEGR |
| NO: 111) | (IMGT/HLA | DSPEDFVFQFKGMCYFTNGTERVRLVTRYIYNRE |
| | Accession No. | EYARFDSDVGVYRAVTPQGRPDAEYWNSQKEV |
| | HLA00646) | LEGTRAELDTVCRHNYEVAFRGILQRRVEPTVTI |
| | * Predicted signal | SPSRTEALNHHNLLVCSVTDFYPGQIKVRWFRND |
| | peptide underlined | QEETAGVVSTPLIRNGDWTFQILVMLEMTPQRG |
| | | DVYTCHVEHPSLQSPITVEWRAQSESAQSKMLSG |
| | | VGGFVLGLIFLGLGLIIRQRSQKGLLH |
| (SEQ ID | DQB1*05: 01 | MSWKKSLRIPGDLRVATVTLMLAILSSSLAEGRD |
| NO: 112) | (IMGT/HLA | SPEDFVYQFKGLCYFTNGTERVRGVTRHIYNREE |
| | Accession No. | YVRFDSDVGVYRAVTPQGRPVAEYWNSQKEVL |
| | HLA00638) | EGARASVDRVCRHNYEVAYRGILQRRVEPTVTIS |
| | * Predicted signal | PSRTEALNHHNLLICSVTDFYPSQIKVRWFRNDQ |
| | peptide underlined | EETAGVVSTPLIRNGDWTFQILVMLEMTPQRGD |
| | | VYTCHVEHPSLQSPITVEWRAQSESAQSKMLSGV |
| | | GGFVLGLIFLGLGLIIRQRSRKGLLH |
| (SEQ ID | DQB1*02: 02 | MSWKKALRIPGGLRAATVTLMLSMLSTPVAEGR |
| NO: 113) | (IMGT/HLA | DSPEDFVYQFKGMCYFTNGTERVRLVSRSIYNRE |
| | Accession No. | EIVRFDSDVGEFRAVTLLGLPAAEYWNSQKDILE |
| | HLA00623) | RKRAAVDRVCRHNYQLELRTTLQRRVEPTVTISP |
| | * Predicted signal | SRTEALNHHNLLVCSVTDFYPAQIKVRWFRNGQ |
| | peptide underlined | EETAGVVSTPLIRNGDWTFQILVMLEMTPQRGD |
| | | VYTCHVEHPSLQSPITVEWRAQSESAQSKMLSGI |
| | | GGFVLGLIFLGLGLIIHHRSQKGLLH |
| (SEQ ID | DQB1*03: 02 | MSWKKALRIPGGLRVATVTLMLAMLSTPVAEGR |
| NO: 114) | (IMGT/HLA | DSPEDFVYQFKGMCYFTNGTERVRLVTRYIYNR |
| | Accession No. | EEYARFDSDVGVYRAVTPLGPPAAEYWNSQKEV |
| | HLA00627) | LERTRAELDTVCRHNYQLELRTTLQRRVEPTVTI |
| | * Predicted signal | SPSRTEALNHHNLLVCSVTDFYPAQIKVRWFRND |
| | peptide underlined | QEETTGVVSTPLIRNGDWTFQILVMLEMTPQRGD |
| | | VYTCHVEHPSLQNPIIVEWRAQSESAQSKMLSGI |
| | | GGFVLGLIFLGLGLIIHHRSQKGLLH |
| (SEQ ID | DQB1*06: 03 | MSWKKALRIPGDLRVATVTLMLAMLSSLLAEGR |
| NO: 115) | (IMGT/HLA | DSPEDFVYQFKGMCYFTNGTERVRLVTRHIYNR |
| | Accession No. | EEYARFDSDVGVYRAVTPQGRPDAEYWNSQKE |
| | HLA00647) | VLEGTRAELDTVCRHNYEVAFRGILQRRVEPTVT |
| | * Predicted signal | ISPSRTEALNHHNLLVCSVTDFYPGQIKVRWFRN |
| | peptide underlined | DQEETAGVVSTPLIRNGDWTFQILVMLEMTPQR |
| | | GDVYTCHVEHPSLQSPITVEWRAQSESAQSKMLS |
| | | GVGGFVLGLIFLGLGLIIRQRSQKGLLH |
| (SEQ ID | DQB1*03: 03 | MSWKKALRIPGGLRVATVTLMLAMLSTPVAEGR |
| NO: 116) | (IMGT/HLA | DSPEDFVYQFKGMCYFTNGTERVRLVTRYIYNR |
| | Accession No. | EEYARFDSDVGVYRAVTPLGPPDAEYWNSQKEV |
| | HLA00629) | LERTRAELDTVCRHNYQLELRTTLQRRVEPTVTI |
| | * Predicted signal | SPSRTEALNHHNLLVCSVTDFYPAQIKVRWFRND |
| | peptide underlined | QEETTGVVSTPLIRNGDWTFQILVMLEMTPQRGD |
| | | VYTCHVEHPSLQNPIIVEWRAQSESAQSKMLSGI |
| | | GGFVLGLIFLGLGLIIHHRSQKGLLH |
| (SEQ ID | DQB1*06: 04 | MSWKKALRIPGDLRVATVTLMLAMLSSLLAEGR |
| NO: 117) | (IMGT/HLA | DSPEDFVYQFKGMCYFTNGTERVRLVTRHIYNR |
| | Accession No. | EEYARFDSDVGVYRAVTPQGRPVAEYWNSQKE |
| | HLA00648) | VLERTRAELDTVCRHNYEVGYRGILQRRVEPTV |
| | * Predicted signal | TISPSRTEALNHHNLLVCSVTDFYPGQIKVQWFR |
| | peptide underlined | NDQEETAGVVSTPLIRNGDWTFQILVMLEMTPQ |
| | | RGDVYTCHVEHPSLQSPITVEWRAQSESAQSKM |
| | | LSGVGGFVLGLIFLGLGLIIRQRSQKGLLH |
| (SEQ ID | DQB1*05: 03 | MSWKKSLRIPGDLRVATVTLMLAILSSSLAEGRD |
| NO: 118) | (IMGT/HLA | SPEDFVYQFKGLCYFTNGTERVRGVTRHIYNREE |
| | Accession No. | YVRFDSDVGVYRAVTPQGRPDAEYWNSQKEVL |
| | HLA00640) | EGARASVDRVCRHNYEVAYRGILQRRVEPTVTIS |
| | * Predicted signal | PSRTEALNHHNLLICSVTDFYPSQIKVRWFRNDQ |
| | peptide underlined | EETAGVVSTPLIRNGDWTFQILVMLEMTPQRGD |
| | | VYTCHVEHPSLQSPITVEWRAQSESAQSKMLSGV |
| | | GGFVLGLIFLGLGLIIRQRSRKGPQGPPPAGLLH |
| (SEQ ID | DQB1*04: 02 | MSWKKALRIPGGLRVATVTLMLAMLSTPVAEGR |
| NO: 119) | (IMGT/HLA | DSPEDFVFQFKGMCYFTNGTERVRGVTRYIYNR |
| | Accession No. | EEYARFDSDVGVYRAVTPLGRLDAEYWNSQKDI |
| | HLA00637) | LEEDRASVDTVCRHNYQLELRTTLQRRVEPTVTI |
| | * Predicted signal | SPSRTEALNHHNLLVCSVTDFYPAQIKVRWFRND |
| | peptide underlined | QEETTGVVSTPLIRNGDWTFQILVMLEMTPQRGD |
| | | VYTCHVEHPSLQNPIIVEWRAQSESAQSKMLSGI |
| | | GGFVLGLIFLGLGLIIHHRSQKGLLH |
| (SEQ ID | DPA1*01: 03 | MRPEDRMFHIRAVILRALSLAFLLSLRGAGAIKA |
| NO: 120) | (IMGT/HLA | DHVSTYAAFVQTHRPTGEFMFEFDEDEMFYVDL |
| | Accession No. | DKKETVWHLEEFGQAFSFEAQGGLANIAILNNNL |
| | HLA00499) | NTLIQRSNHTQATNDPPEVTVFPKEPVELGQPNT |
| | * Predicted signal | LICHIDKFFPPVLNVTWLCNGELVTEGVAESLFLP |
| | peptide underlined | RTDYSFHKFHYLTFVPSAEDFYDCRVEHWGLDQ |
| | | PLLKHWEAQEPIQMPETTETVLCALGLVLGLVGI |
| | | IVGTVLIIKSLRSGHDPRAQGTL |
| (SEQ ID | DPA1*02: 01 | MRPEDRMFHIRAVILRALSLAFLLSLRGAGAIKA |
| NO: 121) | (IMGT/HLA | DHVSTYAAFVQTHRPTGEFMFEFDEDEQFYVDL |
| | Accession No. | DKKETVWHLEEFGRAFSFEAQGGLANIAILNNNL |
| | HLA00504) | NTLIQRSNHTQAANDPPEVTVFPKEPVELGQPNT |
| | * Predicted signal | LICHIDRFFPPVLNVTWLCNGEPVTEGVAESLFLP |
| | peptide underlined | RTDYSFHKFHYLTFVPSAEDVYDCRVEHWGLDQ |
| | | PLLKHWEAQEPIQMPETTETVLCALGLVLGLVGI |
| | | IVGTVLIIKSLRSGHDPRAQGPL |
| (SEQ ID | DPA1*02: 07 | MRPEDRMFHIRAVILRALSLAFLLSLRGAGAIKA |
| NO: 122) | (IMGT/HLA | DHVSTYAMFVQTHRPTGEFMFEFDEDEQFYVDL |
| | Accession No. | DKKETVWHLEEFGRAFSFEAQGGLANIAILNNNL |
| | HLA15619) | NTLIQRSNHTQAANDPPEVTMFPKEPVELGQPNT |
| | * Predicted signal | LICHIDRFFPPVLNVTWLCNGEPVTEGVAESLFLP |
| | peptide underlined | RTDYSFHKFHYLTFVPSAEDVYDCRVEHWGLDQ |
| | | PLLKHWEAQEPIQMPETTETVLCALGLVLGLVGI |
| | | IVGTVLIIKSLRSGHDPRAQGPL |
| (SEQ ID | DPB1*04: 01 | MMVLQVSAAPRTVALTALLMVLLTSVVQGRAT |
| NO: 123) | (IMGT/HLA | PENYLFQGRQECYAFNGTQRFLERYIYNREEFAR |
| | Accession No. | FDSDVGEFRAVTELGRPAAEYWNSQKDILEEKR |
| | HLA00521) | AVPDRMCRHNYELGGPMTLQRRVQPRVNVSPS |
| | * Predicted signal | KKGPLQHHNLLVCHVTDFYPGSIQVRWFLNGQE |
| | peptide underlined | ETAGVVSTNLIRNGDWTFQILVMLEMTPQQGDV |
| | | YTCQVEHTSLDSPVTVEWKAQSDSARSKTLTGA |
| | | GGFVLGLIICGVGIFMHRRSKKVQRGSA |
| (SEQ ID | DPB1*02: 01 | MMVLQVSAAPRTVALTALLMVLLTSVVQGRAT |
| NO: 124) | (IMGT/HLA | PENYLFQGRQECYAFNGTQRFLERYIYNREEFVR |
| | Accession No. | FDSDVGEFRAVTELGRPDEEYWNSQKDILEEERA |
| | HLA00517) | VPDRMCRHNYELGGPMTLQRRVQPRVNVSPSK |
| | * Predicted signal | KGPLQHHNLLVCHVTDFYPGSIQVRWFLNGQEE |
| | peptide underlined | TAGVVSTNLIRNGDWTFQILVMLEMTPQQGDVY |
| | | TCQVEHTSLDSPVTVEWKAQSDSARSKTLTGAG |
| | | GFVLGLIICGVGIFMHRRSKKVQRGSA |
| (SEQ ID | DPB1*04: 02 | MMVLQVSAAPRTVALTALLMVLLTSVVQGRAT |
| NO: 125) | (IMGT/HLA | PENYLFQGRQECYAFNGTQRFLERYIYNREEFVR |
| | Accession No. | FDSDVGEFRAVTELGRPDEEYWNSQKDILEEKR |
| | HLA00522) | AVPDRMCRHNYELGGPMTLQRRVQPRVNVSPS |
| | * Predicted signal | KKGPLQHHNLLVCHVTDFYPGSIQVRWFLNGQE |
| | peptide underlined | ETAGVVSTNLIRNGDWTFQILVMLEMTPQQGDV |
| | | YTCQVEHTSMDSPVTVEWKAQSDSARSKTLTGA |
| | | GGFVLGLIICGVGIFMHRRSKKVQRGSA |
| (SEQ ID | DPB1*03: 01 | MMVLQVSAAPRTVALTALLMVLLTSVVQGRAT |
| NO: 126) | (IMGT/HLA | PENYVYQLRQECYAFNGTQRFLERYIYNREEFVR |
| | Accession No. | FDSDVGEFRAVTELGRPDEDYWNSQKDLLEEKR |
| | HLA00520) | AVPDRVCRHNYELDEAVTLQRRVQPKVNVSPSK |
| | * Predicted signal | KGPLQHHNLLVCHVTDFYPGSIQVRWFLNGQEE |
| | peptide underlined | TAGVVSTNLIRNGDWTFQILVMLEMTPQQGDVY |
| | | ICQVEHTSLDSPVTVEWKAQSDSARSKTLTGAG |
| | | GFVLGLIICGVGIFMHRRSKKVQRGSA |
| (SEQ ID | DPB1*01: 01 | MMVLQVSAAPRTVALTALLMVLLTSVVQGRAT |
| NO: 127) | (IMGT/HLA | PENYVYQGRQECYAFNGTQRFLERYIYNREEYA |
| | Accession No. | RFDSDVGEFRAVTELGRPAAEYWNSQKDILEEK |
| | HLA00514) | RAVPDRVCRHNYELDEAVTLQRRVQPKVNVSPS |
| | * Predicted signal | KKGPLQHHNLLVCHVTDFYPGSIQVRWFLNGQE |
| | peptide underlined | ETAGVVSTNLIRNGDWTFQILVMLEMTPQQGDV |
| | | YICQVEHTSLDSPVTVEWKAQSDSAQSKTLTGA |
| | | GGFVLGLIICGVGIFMHRRSKKVQRGSA |
| (SEQ ID | DPB1*11: 01 | MMVLQVSAAPRTVALTALLMVLLTSVVQGRAT |
| NO: 128) | (IMGT/HLA | PENYVYQLRQECYAFNGTQRFLERYIYNRQEYA |
| | Accession No. | RFDSDVGEFRAVTELGRPAAEYWNSQKDLLEER |
| | HLA00528) | RAVPDRMCRHNYELDEAVTLQRRVQPKVNVSPS |
| | * Predicted signal | KKGPLQHHNLLVCHVTDFYPGSIQVRWFLNGQE |
| | peptide underlined | ETAGVVSTNLIRNGDWTFQILVMLEMTPQQGDV |
| | | YICQVEHTSLDSPVTVEWKAQSDSARSKTLTGA |
| | | GGFVLGLIICGVGIFMHRRSKKVQRGSA |
| (SEQ ID | DPB1*05: 01 | MMVLQVSAAPRTVALTALLMVLLTSVVQGRAT |
| NO: 129) | (IMGT/HLA | PENYLFQGRQECYAFNGTQRFLERYIYNREELVR |
| | Accession No. | FDSDVGEFRAVTELGRPEAEYWNSQKDILEEKR |
| | HLA00523) | AVPDRMCRHNYELDEAVTLQRRVQPKVNVSPSK |
| | * Predicted signal | KGPLQHHNLLVCHVTDFYPGSIQVRWFLNGQEE |
| | peptide underlined | TAGVVSTNLIRNGDWTFQILVMLEMTPQQGDVY |
| | | ICQVEHTSLDSPVTVEWKAQSDSARSKTLTGAG |
| | | GFMLGLIICGVGIFMHRRSKKVQRGSA |
| (SEQ ID | DPB1*10: 01 | MMVLQVSAAPRTVALTALLMVLLTSVVQGRAT |
| NO: 130) | (IMGT/HLA | PENYVHQLRQECYAFNGTQRFLERYIYNREEFVR |
| | Accession No. | FDSDVGEFRAVTELGRPDEEYWNSQKDILEEERA |
| | HLA00527) | VPDRVCRHNYELDEAVTLQRRVQPKVNVSPSKK |
| | * Predicted signal | GPLQHHNLLVCHVTDFYPGSIQVRWFLNGQEET |
| | peptide underlined | AGVVSTNLIRNGDWTFQILVMLEMTPQQGDVYI |
| | | CQVEHTSLDSPVTVEWKAQSDSARSKTLTGAGG |
| | | FVLGLIICGVGIFMHRRSKKVQRGSA |
| (SEQ ID | DPB1*06: 01 | MMVLQVSAAPRTVALTALLMVLLTSVVQGRAT |
| NO: 131) | (IMGT/HLA | PENYVYQLRQECYAFNGTQRFLERYIYNREEFVR |
| | Accession No. | FDSDVGEFRAVTELGRPDEDYWNSQKDLLEEER |
| | HLA00524) | AVPDRMCRHNYELDEAVTLQRRVQPKVNVSPSK |
| | * Predicted signal | KGPLQHHNLLVCHVTDFYPGSIQVRWFLNGQEE |
| | peptide underlined | TAGVVSTNLIRNGDWTFQILVMLEMTPQQGDVY |
| | | ICQVEHTSLDSPVTVEWKAQSDSARSKTLTGAG |
| | | GFVLGLIICGVGIFMHRRSKKVQRGSA |
| (SEQ ID | DPB1*13: 01 | MMVLQVSAAPRTVALTALLMVLLTSVVQGRAT |
| NO: 132) | (IMGT/HLA | PENYVYQLRQECYAFNGTQRFLERYIYNREEYA |
| | Accession No. | RFDSDVGEFRAVTELGRPAAEYWNSQKDILEEER |
| | HLA00530) | AVPDRICRHNYELDEAVTLQRRVQPKVNVSPSK |
| | * Predicted signal | KGPLQHHNLLVCHVTDFYPGSIQVRWFLNGQEE |
| | peptide underlined | TAGVVSTNLIRNGDWTFQILVMLEMTPQQGDVY |
| | | ICQVEHTSLDSPVTVEWKAQSDSARSKTLTGAG |
| | | GFVLGLIICGVGIFMHRRSKKVQRGSA |
| (SEQ ID | DPB1*14: 01 | MMVLQVSAAPRTVALTALLMVLLTSVVQGRAT |
| NO: 133) | (IMGT/HLA | PENYVHQLRQECYAFNGTQRFLERYIYNREEFVR |
| | Accession No. | FDSDVGEFRAVTELGRPDEDYWNSQKDLLEEKR |
| | HLA00531) | AVPDRVCRHNYELDEAVTLQRRVQPKVNVSPSK |
| | * Predicted signal | KGPLQHHNLLVCHVTDFYPGSIQVRWFLNGQEE |
| | peptide underlined | TAGVVSTNLIRNGDWTFQILVMLEMTPQQGDVY |
| | | ICQVEHTSLDSPVTVEWKAQSDSARSKTLTGAG |
| | | GFVLGLIICGVGIFMHRRSKKVQRGSA |
| (SEQ ID | DPB1*17: 01 | MMVLQVSAAPRTVALTALLMVLLTSVVQGRAT |
| NO: 134) | (IMGT/HLA | PENYVHQLRQECYAFNGTQRFLERYIYNREEFVR |
| | Accession No. | FDSDVGEFRAVTELGRPDEDYWNSQKDILEEER |
| | HLA00534) | AVPDRMCRHNYELDEAVTLQRRVQPRVNVSPSK |
| | * Predicted signal | KGPLQHHNLLVCHVTDFYPGSIQVRWFLNGQEE |
| | peptide underlined | TAGVVSTNLIRNGDWTFQILVMLEMTPQQGDVY |
| | | TCQVEHTSLDSPVTVEWKAQSDSARSKTLTGAG |
| | | GFVLGLIICGVGIFMHRRSKKVQRGSA |
| (SEQ ID | HUMAN HLA- | CSHSMRYFYTAVSRPGRGEPRFIAVGYVDDTQF |
| NO: 135) | C*12: 0 | VRFDSDAASPRGEPRAPWVEQEGPEYWDRETQK |
| | | YKRQAQADRVSLRNLRGYYNQSEAGSHTLQRM |
| | | YGCDLGPDGRLLRGYDQSAYDGKDYIALNEDLR |
| | | SWTAADTAAQITQRKWEAAREAEQWRAYLEGT |
| | | CVEWLRRYLENGKETLQRAEHPKTHVTHHPVSD |
| | | HEATLRCWALGFYPAEITLTWQRDGEDQTQDTE |
| | | LVETRPAGDGTFQKWAAVVVPSGEEQRYTCHV |
| | | QHEGLPEPLTLRWEPSSQPTIPIVGIVAGLAVLAV |
| | | LAVLGAVMAVVMCRRKSSGGKGGSCSQAASSN |
| | | SAQGSDESLIACKA |
| (SEQ ID | HUMAN HLA- | GSHSLKYFHTSVSRPGRGEPRFISVGYVDDTQFV |
| NO: 136) | E*01: 032 | RFDNDAASPRMVPRAPWMEQEGSEYWDRETRS |
| | | ARDTAQIFRVNLRTLRGYYNQSEAGSHTLQWMH |
| | | GCELGPDGRFLRGYEQFAYDGKDYLTLNEDLRS |
| | | WTAVDTAAQISEQKSNDASEAEHQRAYLEDTCV |
| | | EWLHKYLEKGKETLLHLEPPKTHVTHHPISDHEA |
| | | TLRCWALGFYPAEITLTWQQDGEGHTQDTELVE |
| | | TRPAGDGTFQKWAAVVVPSGEEQRYTCHVQHE |
| | | GLPEPVTLRWKPASQPTIPIVGIIAGLVLLGSVVS |
| | | GAVVAAVIWRKKSSGGKGGSYSKAEWSDSAQG |
| | | SESHSL |
| (SEQ ID | HUMAN HLA- | GSHSMRYFSAAVSRPGRGEPRFIAMGYVDDTQF |
| NO: 137) | G*01: 01 | VRFDSDSACPRMEPRAPWVEQEGPEYWEEETRN |
| | | TKAHAQTDRMNLQTLRGYYNQSEASSHTLQWM |
| | | IGCDLGSDGRLLRGYEQYAYDGKDYLALNEDLR |
| | | SWTAADTAAQISKRKCEAANVAEQRRAYLEGTC |
| | | VEWLHRYLENGKEMLQRADPPKTHVTHHPVFD |
| | | YEATLRCWALGFYPAEIILTWQRDGEDQTQDVE |
| | | LVETRPAGDGTFQKWAAVVVPSGEEQRYTCHV |
| | | QHEGLPEPLMLRWKQSSLPTIPIMGIVAGLVVLA |
| | | AVVTGAAVAAVLWRKKSSD |

[0203] Additional HLA allele amino acid sequences are known in the art and are available, for example at the IMGT/HLA Database (available on the world wide web at ebi.ac.uk/ipd/imgt/hla/; see Robinson et al. (2015) Nucl. Acids Res. 43: D423-31).

[0204] In some embodiments, the engineered erythroid cell (e.g., engineered enucleated erythroid cell) or enucleated cell (e.g., modified enucleated cell) has been derived from an erythroid precursor cell that has been genetically modified to delete and/or alter expression of an endogenous antigen-presenting polypeptide (e.g. a HLA class I or HLA class II polypeptide). In some embodiments, the engineered erythroid cell (e.g., engineered enucleated erythroid cell) or enucleated cell (e.g., modified enucleated cell) has been derived from an erythroid precursor cell that has not been genetically modified to delete and/or alter expression of an endogenous antigen-presenting polypeptide (e.g. a HLA class I or HLA class II polypeptide).

### Amino Acid Substitutions in the Loadable Exogenous Antigen-Presenting Polypeptide

[0205] In some embodiments, a loadable exogenous antigen-presenting polypeptide described herein comprises one or more amino acid substitutions (as compared to the wild-type protein from which it was derived) which stabilize the loadable exogenous antigen-presenting polypeptide on a cell surface. In some embodiments, the loadable exogenous antigen-presenting polypeptide is stabilized on a cell surface in the absence of a polypeptide bound to the exogenous antigen-presenting polypeptide.

[0206] In some embodiments, the amino acid substitution(s) comprise substitution(s) to cysteine residues, which form disulfide bond(s) that stabilize the exogenous antigen-presenting polypeptide (see, e.g., Hein et al. (2014) J. Cell Sci. 127: 2885-97).

[0207] In some embodiments, the loadable exogenous antigen-presenting polypeptide is derived from a wild-type HLA class I polypeptide, e.g., a HLA-A, a HLA-B, a HLA-C, a HLA-E, or a HLA-G polypeptide, and the amino acid residues at the following specific positions of the HLA polypeptide are substituted to cysteines in the following pairs: 84 and 139; 51 and 175; 5 and 168; 130 and 157; 135 and 140; 11 and 74; 45 and 63; 33 and 49, where these positions relate to the alpha chain of the mature HLA class I polypeptide, without the N-terminal leader sequence.

[0208] The exemplary pairs of amino acid substitutions are set forth below in Table 5 with respect to exemplary HLA class I (e.g., HLA-A, HLA-B, HLA-C, HLA-G, and HLA-E) alleles. These amino acid substitutions are also set forth in FIG. 1, which depicts amino acid sequence alignments of exemplary wild-type alleles of HLA-A (i.e., HLA-A*01:01), HLA-B (i.e., HLA-B*51:01), HLA-C (i.e., HLA-C*12:02), HLA-E (i.e., HLA-E*01:03), and HLA-G (i.e., HLA-G*01:01).

[0209] In some embodiments, the loadable exogenous antigen-presenting polypeptide comprises an amino acid sequence derived from an HLA class I polypeptide comprising amino acid substitutions to cysteine at the amino acid residues 84 and 139 in the alpha chain of the mature HLA class I polypeptide. In other embodiments, the loadable exogenous antigen-presenting polypeptide comprises an HLA class I polypeptide and comprises amino acid substitutions to cysteine at the amino acid residues 51 and 175 in the alpha chain of the mature HLA class I polypeptide. In some embodiments, the loadable exogenous antigen-presenting polypeptide comprises an amino acid sequence derived from an HLA class I polypeptide that does not include amino acid substitutions to cysteine at the amino acid residues 84 and 139 in the alpha chain of the mature HLA class I polypeptide.

[0210] In some embodiments, the loadable exogenous antigen-presenting polypeptide, e.g., the HLA polypeptide, comprises at least 1, 2, 3, 4, 5, 6, 7, or 8 of the pairs of amino acid substitutions set forth below in Table 5.

TABLE 5
Exemplary Pairs of HLA Class I Amino Acid Substitutions

| | Amino Acid Substitution Pair |
|---|---|
| Allele | (of the mature HLA polypeptide) |
| HLA-A (e.g., HLA- | Y84C and A139C |
| A*01:01) | W51C and G175C |
| | M5C and L168C |
| | L130C and R157C |
| | A135C and A140C |
| | S11C and D74C |
| | M45C and E63C |
| | F33C and A49C |
| HLA-B (e.g., HLA- | Y84C and A139C |
| B*51:01) | W51C and G175C |
| | M5C and L168C |
| | L130C and R157C |
| | A135C and A140C |
| | A11C and Y74C |
| | T45C and N63C |
| | F33C and A49C |
| HLA-C (e.g., HLA- | Y84C and A139C |
| C*12:02) | W51C and G175C |
| | M5C and L168C |
| | L130C and R157C |
| | A135C and A140C |
| | A11C and D74C |
| | G45C and E63C |
| | F33C and A49C |
| HLA-E (e.g., HLA- | Y84C and A139C |
| E*01:03) | W51C and G175C |
| | L5C and L168C |
| | L130C and R157C |
| | A135C and A140C |
| | S11C and F74C |
| | M45C and E63C |
| | F33C and A49C |
| HLA-G (e.g., HLA- | Y84C and A139C |
| G*01:01) | W51C and G175C |
| | M5C and L168C |
| | L130C and R157C |
| | A135C and A140C |
| | A11C and D74C |
| | M45C and E63C |
| | F33C and A49C |

[0211] In other embodiments, the loadable exogenous antigen-presenting polypeptide comprises an HLA class I polypeptide and comprises a mutation to an alanine at amino acid residue 84 in the alpha chain of the mature HLA class I polypeptide. In some embodiments, the loadable exogenous antigen-presenting comprises an amino acid sequence derived from an HLA class I polypeptide that does not include a mutation to an alanine or to a cysteine at amino acid residue 84 in the alpha chain of the mature HLA class I polypeptide.

[0212] In some embodiments, the loadable exogenous antigen-presenting polypeptide comprises an HLA class I polypeptide, and comprises a mutation to cysteine at the amino acid residue 84 in the alpha chain of the mature HLA class I polypeptide, and further comprises a cysteine at a second amino acid residue of the linker disposed between the β2M polypeptide and the displaceable exogenous polypeptide.

[0213] In some embodiments, the loadable exogenous antigen-presenting polypeptide comprises an HLA-A*02-01 allele, and comprises a Q115E mutation in the alpha chain of the mature HLA class I polypeptide.

[0214] The sequences of the wild-type proteins depicted in FIG. 1 are set forth above in Table 4.

[0215] Amino acid substitutions in other HLA alleles, but that correspond to the amino acid positions recited herein are also encompassed by the present disclosure.

[0216] In some embodiments, the loadable exogenous antigen-presenting polypeptide comprises one or more amino acid substitutions which increase the affinity of the loadable exogenous antigen-presenting polypeptide, e.g., an HLA class I polypeptide, for CD8 TCRs. In some embodiments, a loadable exogenous antigen-presenting polypeptide described herein comprises an amino acid sequence derived from a HLA class I polypeptide, wherein the HLA class I polypeptide comprises at least one amino acid substitution (as compared to the wild-type protein from which it was derived) which increases the affinity of the loadable MHC protein to CD8. In some embodiments, the HLA class I polypeptide is of an HLA-A allele. In some embodiments, the HLA class I polypeptide is of an HLA-A*02-01 allele. In some embodiments, the amino acid substitution is Q115E (e.g., MHCI HLA-A*02-01 Q115E; see e.g., Wooldridge et al. (2005) J. Biol. Chem. 280: 27491-501, the contents of which are hereby incorporated herein by reference).

[0217] In some embodiments, provided herein are nucleic acid molecules encoding the loadable exogenous antigen-presenting polypeptides described herein, wherein the nucleic acid molecule encodes one or more of the mutant loadable exogenous antigen-presenting polypeptides described herein.

[0218] In some embodiments, a loadable exogenous antigen-presenting polypeptide described herein, e.g., comprising an HLA class II polypeptide, comprises one or more amino acid substitutions (as compared to the wild-type protein from which it was derived) which stabilize the loadable exogenous antigen-presenting polypeptide on the cell surface. In some embodiments, the loadable exogenous antigen-presenting polypeptide is stabilized on the cell surface in the absence of a polypeptide bound to the exogenous antigen-presenting polypeptide. Methods of identifying an HLA class II polypeptide comprising one or more amino acid substitutions of interest are known in the art and include, e.g., directed evolution by yeast display (see e.g., Esteban et al. (2004) J. Mol. Biol. 340: 81-95; U.S. Pat. No. 7,442,773; Starwalt et al. (2003) Protein Eng. 16(2): 147-56; U.S. Patent Application No. 2002/0165149; Brophy et al. (2003) J. Immunol. Methods 272: 235-46; U.S. Patent Application Publication No. 2003/0036506; each of which are incorporated in their entirety herein by reference).

### Exogenous Displaceable Polypeptides

[0219] In some embodiments, the loadable exogenous antigen-presented polypeptide described herein is bound to an exogenous displaceable polypeptide. In some embodiments, the loadable exogenous antigen-presenting polypeptide has a lower binding affinity (K_{D}) for the exogenous displaceable polypeptide relative to its binding affinity (K_{D}) for an exogenous antigenic polypeptide. In some embodiments, the exogenous displaceable polypeptide binds to the loadable exogenous antigen-presenting polypeptide with a K_{D} of from about 1 nM to about 100 μM, from about 10 nm to about 100 μm, from about 50 nm to about 100 μm, from about 100 nm to about 100 μm, from about 150 nm to about 100 μm, from about 200 nm to about 100 μm, from about 250 nm to about 100 μm, from about 300 nm to about 100 μm, from about 400 nm to about 100 μm, from about 500 nm to about 100 μm, from about 600 nm to about 100 μm, from about 700 nm to about 100 μm, from about 800 nm to about 100 μm, from about 900 nm to about 100 μm, from about 1 μM to about 100 μm, from about 5 uM to about 100 μm, from about 10 μm to about 100 μm, from about 20 μm to about 100 μm, from about 30 μm to about 100 μm, from about 40 μm to about 100 μm, from about 50 μm to about 100 μm, from about 60 μm to about 100 μm, from about 70 μm to about 100 μm, from about 80 μm to about 100 μm, or from about 90 μm to about 100 μm.

[0220] In some embodiments, the exogenous displaceable polypeptide is from about 8 amino acids in length to about 30 amino acids in length, for example 8, 9, 10, 11, 12, 13, 14, 15, 16, 17, 18, 19, 20, 21, 22, 23, 24, 25, 26, 27, 28, 29, or 30 amino acids in length. In further embodiments, the exogenous displaceable polypeptide comprises a cleavable site (e.g., an enzymatic cleavage site (e.g., as described herein)).

[0221] In some embodiments, the exogenous displaceable polypeptide is covalently attached to the loadable exogenous antigen-presenting polypeptide. In some embodiments, the exogenous displaceable polypeptide is non-covalently attached to the loadable exogenous antigen-presenting polypeptide. Further details of covalent attachments are described in the methods below.

[0222] In certain embodiments, the exogenous displaceable polypeptide comprises or consists of an antigenic polypeptide selected from Table 6, or a fragment or variant thereof

TABLE 6
Exemplary Exogenous Displaceable Polypeptides

| | | Displaceable | | | |
|---|---|---|---|---|---|
| | SEQ | Polypeptide | | | |
| HLAI | ID | Amino Acid | | Polypeptide/HLAI | |
| allele | NO: | Sequence | Description | Kd (nM) | Reference |
| HLA- | 138 | ILKEPVHGV | Human | 2.5 | Saini et al. |
| A*02:01 | 139 | IAKEPVHGV | Immunodeficiency | 7288* | (2015) |
| | 140 | ILKEPVHGA | Virus (HIV)- | 1095* | Proc. |
| | 141 | IAKEPVHGA | derived Reverse | 1911* | Nat'l. |
| | | | Transcriptase | | Acad. Sci. |
| | | | (RT) amino acid | | USA 112: |
| | | | residues 476-484 | | 202-7. |
| | 142 | GLKEPQIQV | | 308* | |
| | 143 | NLVPMVATA | Cytomegalovirus | 171* | |
| | | | (CMV)-derived | | |
| | | | pp65 | | |
| HLA- | 144 | IRAAPPPLA | | 1615.4* | |
| B*27:05 | | | | | |

*Predicted binding affinity determined using NetMHCpan 4.0 (available on the world wide web at cbs.dtu.dk/services/NetMHCpan/; see also Jurtz et al. (2017) J. Immunol. 199: 3360-8)

[0223] Methods of determining the affinity of a polypeptide (e.g., an exogenous displaceable polypeptide) to a loadable exogenous antigen-presenting polypeptide, e.g., the HLA molecule are known in the art and include, for example, surface plasmon resonance (SPR).

[0224] Suitable exogenous displaceable polypeptides, i.e., polypeptides that can specifically bind to a loadable exogenous antigen-presenting polypeptide and which can be displaced by an exogenous antigenic polypeptide of interest, can be identified using methods known in the art. In some embodiments, the ability of a polypeptide to displace a displaceable polypeptide from a loadable exogenous antigen-presenting polypeptide can be detected in vitro using recombinant proteins as measured using thermal denaturation measured by tryptophan fluorescence (TDTF) as described in Saini et al. (2015) Proc. Nat'l. Acad. Sci. USA 112: 202-7, the contents of which are incorporated by reference herein. In addition, the exchange of an exogenous displaceable peptide for a peptide of interest can be measured for example, by fluorescent anisotropy using fluorescently-labeled peptides (e.g., labelled with FITC or TAMRA).

### Exogenous Antigenic Polypeptides

[0225] In some embodiments, the engineered enucleated erythroid cells or enucleated cells described herein comprise a wild-type or loadable exogenous antigen-presenting polypeptide bound to an exogenous antigenic polypeptide. In some embodiments, presentation of the exogenous antigenic polypeptide(s) provided herein are capable of activating one or more antigen-specific T cell populations (e.g., in vitro or in vivo). In some embodiments, the exogenous antigenic polypeptide(s) described herein are capable of inducing an immune response to inhibit a cancer (e.g., reduces or alleviates a cause or symptom of a cancer, or improves a value for a parameter associated with the cancer). In some embodiments, the exogenous antigenic polypeptide(s) described herein are capable of inducing an immune response, inhibit an infectious disease (e.g., reduces or alleviates a cause or symptom of an infectious disease, or improves a value for a parameter associated with the infectious disease.) In some embodiments, the exogenous antigenic polypeptide(s) described herein are capable of inducing an immune response to inhibit an autoimmune disease (e.g., reduces or alleviates a cause or symptom of an autoimmune disease, or improves a value for a parameter associated with the autoimmune disease).

[0226] In the present disclosure, exogenous antigenic polypeptide(s) can be chosen based on the specific needs of a subject, and can be bound to a pre-selected wild-type or loadable exogenous antigen-presenting polypeptide, thus allowing for customizable treatment of the subject with a particular exogenous antigenic polypeptide. In some embodiments, multiple different (e.g., two, three, four, five or more) exogenous antigenic polypeptides can be chosen based on the specific needs of a subject, and can be bound to wild-type or loadable exogenous antigen-presenting polypeptides on the same engineered erythroid cell or enucleated cell or on different cells within a population of engineered erythroid cells or enucleated cells, thus allowing for customizable treatment of the subject with multiple particular exogenous antigenic polypeptides.

[0227] The exogenous antigenic polypeptide can include any antigenic polypeptide capable of inducing an immune response. In some embodiments, the exogenous antigenic polypeptide comprises or consists of an antigenic polypeptide selected from Table 7, or a fragment or variant thereof, or an antibody molecule thereto. Table 7 also provides non-limiting examples of HLA class I polypeptide alleles that may be incorporated into a wild-type or loadable exogenous antigen-binding polypeptide described herein, for binding to the specified antigenic polypeptide.

TABLE 7
Exogenous Antigenic Polypeptides

| | SEQ | | |
|---|---|---|---|
| | ID | Antigenic | HLA Class I |
| Description | NO: | Polypeptide | Alleles |
| EBNA3A₃₇₉₋₃₈₇ | 145 | RPPIFIRRL | HLA-B:07:01 |
| EBNA3A₆₉₃₋₆₁₁ | 146 | RLRAEAQVK | HLA-A:03 |
| EBNA3B₄₁₆₋₄₂₄ | 147 | IVTDFSVIK | HLA-A:11:01 |
| EBNA 3C ₁₆₃₋₁₇₁ | 148 | EGGVGWRHW | HLA-B:44 |
| EBNA 3C₈₈₁₋₈₉₁ | 149 | QPRAPIRPI | HLA-B:07:02 |
| EBNA 3A₃₂₅₋₃₃₃ | 150 | FRLGRAYGL | HLA-B:08:01 |
| EBNA 3A₄₅₈₋₄₆₆ | 151 | YPLHEQHGM | HLA-B:35 |
| LMP-2₄₂₆₋₄₃₄ | 152 | CLGGLLTMV | HLA-A:02:01 |
| BMLF-1: | 153 | GLCTLVAML | HLA-A:02:01 |
| BZLF-1₁₉₀₋₁₉₇ | 154 | RAKFKQLL | HLA-B:08:01 |
| CMV | 155 | NLVPMVATV | HLA-A:02:01 |
| | 156 | FIAGNSAYEYV | HLA-A:02:01 |
| | 157 | SDEEEAIVAYTL | HLA-B:18:05 |
| Gp100₂₀₉₋₂₁₇ | 158 | ITDQVPFSV | HLA-A:02:01 |
| Tyrosinase₃₆₉₋₃₇₇ | 159 | YMDGTMSQV | HLA-A:02:01 |
| Melan-A₂₆₋₃₅ | 160 | EAAGIGILTV | HLA-A:02:01 |
| MAGEA3 ₁₁₄₋₁₂₂ | 161 | AELVHFLLL | HLA-B:40:01 |
| MAGEA3 ₂₇₁₋₂₇₉ | 162 | FLWGPRALV | HLA-A:02:01 |
| MAGEA10₂₅₄₋₂₆₂ | 163 | GLYDGMEHL | HLA-A:02:01 |
| MAGEC2₃₃₆₋₃₄₄ | 164 | ALKDVEERV | HLA-A:02:01 |
| MAGEC2₄₂₋₅₀ | 165 | ASSTLYLVF | HLA-B:57:02 |
| MAGEC2₁₉₁₋₂₀₀ | 166 | LLGLALIEV | HLA-A:02:01 |
| NYESO-1₁₅₇₋₁₆₅ | 167 | SLLMWITQC | HLA-A:02:01 |
| HPV16E7₁₁₋₂₀ | 168 | YMLDLQPETT | HLA-A:02:01 |
| HPV16E7₁₁₋₁₀ | 41 | YMLDLQPET | HLA-A:02:01 |
| HPV16E6₂₀₋₃₈ | 43 | TIHDIILECV | HLA-A:02:01 |
| ME-1 | 169 | FLDEFMEGV | HLA-A:02:01 |
| FNDC3B | 170 | VVMSWAPPV | HLA-A:02:01 |
| PRDX5 | 171 | LLLDDLLVSI | HLA-A:02:01 |
| GAS7 | 172 | SLADEAEVYL | HLA-A:02:01 |
| KIAA0223 | 173 | VLHDDLLEA | HLA-A:02:01 |
| GAPDH | 174 | GIVEGLITTV | HLA-A:02:01 |
| HSP70 | 175 | SLFEGIDIVT | HLA-A:02:01 |
| ACTININ | 176 | FIASNGVKLV | HLA-A:02:01 |
| HAUS3 | 177 | ILNAMIAKI | HLA-A:02:01 |
| CSNK1A1 | 178 | GLFGDIYLAI | HLA-A:02:01 |
| CLPP | 179 | ILDKVLVHL | HLA-A:02:01 |
| CDK4 | 180 | ACDPHSGHFV | HLA-A:02:01 |
| AHNAK | 181 | FMPDFDLHL | HLA-A:02:01 |
| SRPX | 182 | TLWCSPIKV | HLA-A:02:01 |
| COL18A1 | 183 | VLLGVKLFGV | HLA-A:02:01 |
| ERBB2 | 184 | ALIHHNTYL | HLA-A:02:01 |
| TEAD1 | 185 | VLENFTIFLV | HLA-A:02:01 |
| TEAD1 | 186 | SVLENFTIFL | HLA-A:02:01 |
| NSDHL | 187 | ILTGLNYEV | HLA-A:02:01 |
| GANAB | 188 | ALYGFVPVL | HLA-A:02:01 |
| CDC37L1 | 189 | FLSDHLYLV | HLA-A:02:01 |
| FLNA | 190 | HIAKSLFEV | HLA-A:02:01 |
| SPOP | 191 | FLLDEAIGL | HLA-A:02:01 |
| ACPP | 192 | VLAKKLKFV | HLA-A:02:01 |
| DCAKD | 193 | LLHTELERFL | HLA-A:02:01 |
| CIT | 194 | TLLSQVNKV | HLA-A:02:01 |

[0228] In other embodiments, the exogenous antigenic polypeptide comprises or consist of an antigenic polypeptide selected from Table 8, or a fragment or variant thereof, or an antibody molecule thereto. Table 8 provides non-limiting examples of HLA polypeptide alleles that may be incorporated into a wild-type or loadable exogenous antigen-presenting polypeptide described herein, for binding to the specified antigenic polypeptide.

TABLE 8
Exogenous Antigenic Polypeptides

| | | | HLA | | | |
|---|---|---|---|---|---|---|
| | | | Fre- | SEQ | | |
| | | HLA | quency | ID | | |
| Gene/Protein | Tumor | Allele | (%) | NO: | Peptide | Position |
| ABL-BCR alb-b3 | | A2 | | 195 | FVEHDDESPGL | |
| (b2a2) Mutation | | | | | | |
| ABL-BCR alb-b4 | | A3 | | 195 | FVEHDDESPGL | |
| (b3a2) Mutation | | | | | | |
| PPP1R3B | melanoma | A1 | 26 | 196 | YTDFHCQYV | 172-180 |
| alpha-actinin-4 | lung carcinoma | A2 | 44 | 176 | FIASNGVKLV | 118-127 |
| ARTC1 | melanoma | DR1 | 18 | 197 | YSVYFNLPADTIYTNH | |
| CASP-8 | head and neck | B35 | 20 | 198 | FPSDSWCYF | 476-484 |
| | squamous cell | | | | | |
| | carcinoma | | | | | |
| beta-catenin | melanoma | A24 | 20 | 199 | SYLDSGIHF | 29-37 |
| Cdc27 | melanoma | DR4 | 24 | 200 | FSWAMDLDPKGAE | 760-771 |
| CDK4 | melanoma | A2 | 44 | 180 | ACDPHSGHFV | 23-32 |
| CDK12 | melanoma | A11 | 13 | 201 | CILGKLFTK | 924-932 |
| CDKN2A | melanoma | A11 | 13 | 202 | AVCPWTWLRG | 125-133 |
| | | | | | | (p14ARF- |
| | | | | | | ORF3) |
| CLPP | melanoma | A2 | 44 | 179 | ILDKVLVHL | 240-248 |
| COA-1 | colorectal | DR4 | 24 | 203 | TLYQDDTLTLQAAGE | 447-460 |
| | carcinoma | DR13 | 19 | 203 | TLYQDDTLTLQAAGE | 447-460 |
| CSNK1A1 | melanoma | A2 | 44 | 204 | GLFGDIYLA | 26-34 |
| EFTUD2 | melanoma | A3 | 22 | 205 | KILDAVVAQK | 668-677 |
| Elongation factor 2 | lung squamous CC | A68 | 8 | 206 | ETVSEQSNV | 581-589 |
| FN1 | melanoma | DR2 | 25 | 207 | MIFEKHGFRRTTPP | 2050-2063 |
| GAS7 | melanoma | A2 | 44 | 172 | SLADEAEVYL | 141-150 |
| GPNMB | melanoma | A3 | 22 | 208 | TLDWLLQTPK | 179-188 |
| HAUS3 | melanoma | A2 | 44 | 209 | ILNAMIAKIJ | 154-162 |
| HSDL1 | ovarian cancer | Cw14 | 4 | 210 | CYMEAVAL | 20-27 |
| LDLR- | melanoma | DR1 | 18 | 211 | WRRAPAPGA | 315-323 |
| fucosyltransferaseAS | | | | 212 | PVTWRRAPA | 312-320 |
| fusion protein | | | | | | |
| HLA-A2d | renal cell carcinoma | | | | | |
| HLA-A11d | melanoma | | | | | |
| HLA-A0201-R170I | | A2 | | 213 | CVEWLRIYLENG | |
| hsp70-2 | renal cell carcinoma | A2 | 44 | 214 | SLFEGIDIYT | 286-295 |
| | bladder tumor | B44 | 21 | 215 | AEPINIQTW | 262-270 |
| IgGH | | A2 | | 216 | LMISRTPEV | |
| MART2 | melanoma | A1 | 26 | 217 | FLEGNEVGKTY | 446-455 |
| MATN | melanoma | A11 | 13 | 218 | KTLTSVFQK | 226-234 |
| k-ras | non-small cell lung | A2 | 44 | 169 | FLDEFMEGV | 224-232 |
| | carcinoma | A2 | | 219 | KLVVVGAVGV | |
| | | A2 | | 220 | LVVVGAVGV | |
| | | B35 | | 221 | VVVGAVGVG | |
| MUM-1f | melanoma | B44 | 21 | 222 | EEKLIVVLF | 30-38 |
| MUM-2 | melanoma | B44 | 21 | 223 | SELFRSGLDSY | 123-133 |
| | | Cw6 | 18 | 224 | FRSGLDSYV | 126-134 |
| MUM-3 | melanoma | A68 | 8 | 225 | EAFIQPITR | 322-330 |
| neo-PAP | melanoma | DR7 | 25 | 226 | RVIKNSIRLTLE | 724-734 |
| NFYC | lung squamous cell | B52 | 5 | 227 | QQITKTEV | 275-282 |
| | carcinoma | | | | | |
| OS-9 | melanoma | B44 | 21 | 228 | KELEGILLL | 438-446 |
| PTPRK | melanoma | DR10 | 3 | 229 | PYYFAAELPPRNLPEP | 667-682 |
| N-ras | melanoma | A1 | 26 | 230 | ILDTAGREEY | 55-64 |
| BRAF600 | melanoma | B7 | 17 | 231 | RPHVPESAF | 329-337 |
| SIRT2 | melanoma | A3 | 22 | 232 | KIFSEVTLK | 192-200 |
| SNRPD1 | melanoma | B38 | 5 | 233 | SHETVIIEL | 11-19 |
| Triosephosphate | melanoma | DR1 | 18 | 234 | GELIGILNAAKVPAD | 23-37 |
| isomerase | | | | | | |
| Myosin class I | melanoma | A3 | 22 | 235 | KINKNPKYK | 911-919 |
| BCR-ABL fusion | | A2 | | 236 | KLSEQESLL | |
| | | A2 | | 237 | MLTNSCVKL | |
| | | A2 | | 238 | FMVELVEGA | |
| | | A2 | | 239 | GVRGRVEEI | |
| BCR-ABL fusion | chronic myeloid | A2 | 44 | 240 | SSKALQRPV | 926-934 |
| protein (b3a2) | leukemia | A3 | | 241 | ATGFKQSSK | |
| | | A3 | | 242 | HSATGFKQSSK | |
| | | A3 | | 243 | KQSSKALQR | |
| | | A11 | | 242 | HSATGFKQSSK | |
| | | B8 | 14 | 244 | GFKQSSKAL | 922-930 |
| | | DR4 | 24 | 245 | ATGFKQSSKALQRPVAS | 920-936 |
| | | DR9 | 3 | 245 | ATGFKQSSKALQRPVAS | 920-936 |
| B-RAF | melanoma | A2 | | 246 | LATEKSRWS | |
| | | A2 | | 247 | LATEKSRWSG | |
| | | A33 | | 248 | FGLATEKSR | |
| | | B27 | | 249 | GDFGLATEK | |
| | | DR4 | 24 | 250 | EDLTVKIGDFGLATEKSRWSGSH | 586-614 |
| | | | | | QFEQLS | |
| CASP-5 | colorectal, gastric, and | A2 | 44 | 251 | FLIIWQNTM | 67-75 |
| | endometrial carcinoma | | | | | |
| dek-can fusion | myeloid leukemia | DR53 | 49 | 252 | TMKQICKKEIRRLHQY | 342-357 |
| protein | | | | | | |
| ETV6-AML1 fusion | acute lymphoblastic | A2 | 44 | 253 | RIAECILGMI | 334-342 |
| protein | leukemia | DP5 | 3 | 254 | IGRIAECILGMNPSR | 332-346 |
| | | DP17 | 1 | 254 | IGRIAECILGMNPSR | 332-346 |
| FLT3-ITD | acute myelogenous | A1 | 26 | 255 | YVDFREYEYY | 591-600 |
| | leukemia | | | | | |
| FNDC3B | chronic lymphocytic | A2 | 44 | 170 | VVMSWAPPV | 292-300 |
| | leukemia | | | | | |
| OGT | colorectal carcinoma | A2 | 44 | 256 | SLYKFSPFPLG | 28-37 |
| p53 | head and neck | A2 | 44 | 257 | VVPCEPPEV | 217-225 |
| | squamous cell | | | | | |
| | carcinoma | | | | | |
| pml-RARalpha | promyelocytic | DR11 | 25 | 258 | NSNHVASGAGEAAIETQSSSSEEI | |
| fusion protein | leukemia | | | | V | |
| PAX-FKHR fusion | | B7 | | 259 | SPANSIRHNL | |
| | | B7 | | 260 | SPQNSIRHNL | |
| PRDX5 | melanoma | A2 | 44 | 171 | LLLDDLLVSI | 163-172 |
| | | A2 | | 261 | AMAPIKVRL | |
| K-ras | pancreatic | B35 | 20 | 221 | VVVGAVGVG | 4-15 |
| | adenocarcinoma | | | | | |
| SYT-SSX1 or -SSX2 | sarcoma | A24 | | 262 | GYDQIMPKK | |
| fusion protein | | A24 | | 263 | GYDQIMPKI | |
| | | B7 | 17 | 264 | QRPYGYDQIM | 402-410 |
| | | | | | | (SYT) |
| KIAAO205 | mutation | B44 | 21 | 215 | AEPINIQTW | |
| ME1 | mutation | A2 | 44 | 169 | FLDEFMEGV | |
| EGFRvIII | Mutation | A2 | 44 | 265 | LEEKKGNYV | |
| | | A2 | 44 | 266 | RLSSCVPVAG | 131-139 |
| TGF-betaRII | colorectal carcinoma | A2 | 44 | 266 | RLSSCVPVAG | 111-119 |
| | | | | | | (p16INK4a- |
| | | | | | | ORF3) |
| | | | | | | 111-112 |
| | | | | | | (SSX2) |
| BAGE-1 | | Cw16 | 7 | 267 | AARAVFLAL | 2-10 |
| D393-CD20n | | DR4 | 24 | 268 | KPLFRRMSSLELVIA | 28-42 |
| | | A2 | 44 | 269 | FLDRFLSCM | 227-235 |
| Cyclin-A1 | | A2 | 44 | 270 | SLIAAAAFCLA | 341-351 |
| GAGE-1,2,8 | | Cw6 | 18 | 271 | YRPRPRRY | 9-16 |
| GAGE-3,4,5,6,7 | | A29 | 6 | 272 | YYWPRPRRY | 10-18 |
| GnTVf | | A2 | 44 | 273 | VLPDVFIRC(V) | intron |
| GPC3 | | A2 | | 274 | FLAELAYDL | |
| HERV-E | | A11 | | 275 | ATFLGSLTWK | |
| HERV-K-MEL | | A2 | 44 | 276 | MLAVISCAV | 1-9 |
| KK-LC-1 | | B15 | 13 | 277 | RQKRILVNL | 76-84 |
| | | A24 | 20 | 278 | NYNNFYRFL | 196-204 |
| KM-HN-1 | | A24 | 20 | 279 | EYSKECLKEF | 499-508 |
| | | A24 | 20 | 280 | EYLSLSDKI | 770-778 |
| LAGE-1 | | A2 | 44 | 281 | MLMAQEALAFL | ORF2 |
| | | | | | | (1-11) |
| | | A2 | 44 | 167 | SLLMWITQC | 157-165 |
| | | A31 | 5 | 282 | LAAQERRVPR | ORF2 |
| | | | | | | (18-27) |
| | | A68 | 8 | 283 | ELVRRILSR | 103-111 |
| | | B7 | 17 | 284 | APRGVRMAV | ORF2 |
| | | | | | | (46-54) |
| | | DP4 | 75 | 285 | SLLMWITQCFLPVF | 157-170 |
| | | DR3 | 21 | 286 | QGAMLAAQERRVPRAAEVPR | ORF2 |
| | | | | | | (14-33) |
| | | DR4 | 24 | 287 | AADHRQLQLSISSCLQQL | 139-156 |
| | | DR11 | 25 | 288 | CLSRRPWKRSWSAGSCPGMPHL | ORF2 |
| | | | | | | (81-102) |
| | | DR12 | 5 | 288 | CLSRRPWKRSWSAGSCPGMPHL | ORF2 |
| | | | | | | (81-102) |
| | | DR13 | 19 | 289 | ILSRDAAPLPRPG | 108-120 |
| | | DR15 | 20 | 290 | AGATGGRGPRGAGA | 37-50 |
| LY6K | | A24 | 20 | 291 | RYCNLEGPPI | 119-128 |
| | | DP5 | 3 | 292 | KWTEPYCVIAAVKIFPRFFMVAK | 61-84 |
| | | | | | Q | |
| | | DR15 | 20 | 293 | KCCKIRYCNLEGPPINSSVF | 114-133 |
| MAGE-A1 | | A1 | 26 | 294 | EADPTGHSY | 161-169 |
| | | A*02:01 | | 295 | YLEYRQVPV | |
| | | | | 296 | YLEYRQVPD | |
| | | A2 | 44 | 297 | KVLEYVIKV | 278-286 |
| | | A3 | 22 | 298 | SLFRAVITK | 96-104 |
| | | A24 | | 299 | NYKHCFPEI | |
| | | A68 | 8 | 300 | EVYDGREHSA | 222-231 |
| | | B7 | 17 | 301 | RVRFFFPSL | 289-298 |
| | | B35 | 20 | 294 | EADPTGHSY | 161-169 |
| | | B37 | 3 | 302 | REPVTKAEML | 120-129 |
| | | B44 | 21 | 303 | KEADPTGHSY | 160-169 |
| | | B53 | 2 | 304 | DPARYEFLW | 258-266 |
| | | B57 | 8 | 305 | ITKKVADLVGF | 102-112 |
| | | Cw2 | 10 | 306 | SAFPTTINF | 62-70 |
| | | Cw3 | 17 | 307 | SAYGEPRKL | 230-238 |
| | | Cw7 | 41 | 301 | RVRFFFPSL | 289-298 |
| | | Cw16 | 7 | 307 | SAYGEPRKL | 230-238 |
| | | DP4 | 75 | 308 | TSCILESLFRAVITK | 90-104 |
| | | DP4 | 75 | 309 | PRALAETSYVKVLEY | 268-282 |
| | | DR13 | 19 | 310 | FLLLKYRAREPVTKAE | 112-127 |
| | | DR15 | 20 | 311 | EYVIKVSARVRF | 281-292 |

MAGE-A2

| | | | | | | |
|---|---|---|---|---|---|---|
| | | A2 | 44 | 312 | YLQLVFGIEV | 157-166 |
| | | A2 | | 295 | YLEYRQVPV | |
| | | A2 | | 313 | LVHFLLLKY | |
| | | A2 | | 314 | KMVELVHFL | |
| | | A2 | | 315 | LVQENYLEY | |
| | | A24 | 20 | 316 | EYLQLVFGI | 156-164 |
| | | B37 | 3 | 302 | REPVTKAEML | 127-136 |
| | | Cw7 | 41 | 317 | EGDCAPEEK | 212-220 |
| | | DR13 | 19 | 318 | LLKYRAREPVTKAE | 121-134 |
| MAGE-A3 | | A1 | 26 | 319 | EVDPIGHLY | 168-176 |
| | | A2 | 44 | 320 | FLWGPRALVD | 271-279 |
| | | A2 | 44 | 321 | KVAELVHFL | 112-120 |
| | | A2 | | 295 | YLEYRQVPV | |
| | | A2 | | 322 | LVFGIELMEV | |
| | | A24 | | 323 | IMPKAGLLI | |
| | | A24 | 20 | 324 | TFPDLESEF | 97-105 |
| | | A24 | 20 | 325 | VAELVHFLL | 113-121 |
| | | B18 | 6 | 326 | MEVDPIGHLY | 167-176 |
| | | | | 327 | YLEYRQVPG | |
| | | B35 | 20 | 319 | EVDPIGHLY | 168-176 |
| | | B37 | 3 | 302 | REPVTKAEML | 127-136 |
| | | B40 | 6 | 328 | AELVHFLLLI | 114-122 |
| | | B44 | 21 | 326 | MEVDPIGHLY | 167-176 |
| | | B52 | 5 | 329 | WQYFFPVIF | 143-151 |
| | | Cw7 | 41 | 317 | EGDCAPEEK | 212-220 |
| | | DP4 | 75 | 330 | KKLLTQHFVQENYLEY | 243-258 |
| | | DP4 | 75 | 331 | RKVAELVHFLLLKYR | 111-125 |
| | | DQ6 | 63 | 330 | KKLLTQHFVQENYLEY | 243-258 |
| | | DR1 | 18 | 332 | ACYEFLWGPRALVETS | 267-282 |
| | | DR4 | 24 | 331 | RKVAELVHFLLLKYR | 111-125 |
| | | DR4 | 24 | 333 | VIFSKASSSLQL | 149-160 |
| | | DR7 | 25 | 333 | VIFSKASSSLQL | 149-160 |
| | | DR7 | 25 | 334 | VFGIELMEVDPIGHL | 161-175 |
| | | DR11 | 25 | 335 | GDNQIMPKAGLLIIV | 191-205 |
| | | DR11 | 25 | 336 | TSYVKVLHHMVKISG | 281-295 |
| | | DR13 | 19 | 337 | RKVAELVHFLLLKYRA | 111-126 |
| | | DR13 | 19 | 310 | FLLLKYRAREPVTKAE | 119-134 |
| MAGE-A4 | | A1 | 26 | 338 | EVDPASNTYJ | 169-177 |
| | | A2 | | 295 | YLEYRQVPV | |
| | | A2 | 44 | 339 | GVYDGREHTV | 230-239 |
| | | A24 | 20 | 340 | NYKRCFPVI | 143-151 |
| | | B37 | 3 | 341 | SESLKMIF | 156-163 |
| MAGE-A5 | | | | | | |
| MAGE-A6 | | A34 | 1 | 342 | MVKISGGPR | 290-298 |
| | | B35 | 20 | 343 | EVDPIGHVY | 168-176 |
| | | B37 | 3 | 302 | REPVTKAEML | 127-136 |
| | | Cw7 | 41 | 317 | EGDCAPEEK | 212-220 |
| | | Cw16 | 7 | 344 | ISGGPRISY | 293-301 |
| | | | | 327 | YLEYRQVPG | |
| | | DR13 | 19 | 318 | LLKYRAREPVTKAE | 121-134 |
| MAGE-A7 | | | | | | |
| MAGE-A8 | | A2 | | 345 | KVAELVRFL | |
| | | A2 | | 346 | GLMDVQIPT | |
| MAGE-A9 | | A2 | 44 | 347 | ALSVMGVYV | 223-231 |
| MAGE-A10 | | A2 | 44 | 348 | GLYDGMEHLI | 254-262 |
| | | A2 | | 327 | YLEYRQVPG | |
| | | A2 | | 349 | SLLKFLAKV | |
| | | B53 | 2 | 304 | DPARYEFLW | 290-298 |
| MAGE-A11 | | | | | | |
| MAGE-A12m | | A2g | 44 | 350 | FLWGPRALVE | 271-279 |
| | | A2 | | 295 | YLEYRQVPV | |
| | | Cw7 | 41 | 351 | VRIGHLYIL | 170-178 |
| | | Cw7 | 41 | 317 | EGDCAPEEK | 212-220 |
| | | DP4 | 75 | 352 | REPFTKAEMLGSVIR | 127-141 |
| | | | | 327 | YLEYRQVPG | |
| | | DR13 | 19 | 353 | AELVHFLLLKYRAR | 114-127 |
| MAGE-C1 | | A2 | 44 | 354 | ILFGISLREV | 959-968 |
| | | A2 | 44 | 355 | KVVEFLAML | 1083-1091 |
| | | DQ6 | 63 | 356 | SSALLSIFQSSPE | 137-149 |
| | | DQ6 | 63 | 357 | SFSYTLLSL | 450-458 |
| | | DR15 | 20 | 358 | VSSFFSYTL | 779-787 |
| MAGE-C2 | | A2 | 44 | 359 | LLFGLALIEV | 191-200 |
| | | A2 | 44 | 164 | ALKDVEERV | 336-344 |
| | | | | 360 | TLDEKVAELV | |
| | | | | 361 | KVLEFLAKL | |
| | | | | 362 | FLAKLNNTV | |
| | | | | 363 | VIWEVLNAV | |
| | | B44 | 21 | 364 | SESIKKKVL | 307-315 |
| | | B57 | 8 | 165 | ASSTLYLVF | 42-50 |
| | | DR15 | 20 | 365 | SSTLYLVFSPSSFST | 43-57 |
| MAGE-n | | A2 | | 366 | FLWGPRALA | |
| | | A2 | | 367 | QLVFGIEVV | |
| mucin | | | | 368 | PDTRPAPGSTAPPAHGVTSA | |
| NA88-A | | B13 | 6 | 369 | QGQHFLQKV | |
| NY-ESO-1 / LAGE-2 | | A2 | 44 | 167 | SLLMWITQC | 157-165 |
| | | A2 | 44 | 281 | MLMAQEALAFL | ORF2 |
| | | A2 | | 370 | SLLMWITQCFL | |
| | | A2 | | 371 | QLSLLMWIT | |
| | | A24 | | 372 | LLMWITQCF | |
| | | A24 | 20 | 373 | YLAMPFATPME | 91-101 |
| | | A31 | 5 | 374 | ASGPGGGAPR | 53-62 |
| | | A31 | 5 | 282 | LAAQERRVPR | ORF2 |
| | | | | | | (18-27) |
| | | A68 | 8 | 375 | TVSGNILTIR | 127-136 |
| | | B7 | 17 | 376 | APRGPHGGAASGL | 60-72 |
| | | B35 | 20 | 377 | MPFATPMEAEL | 94-104 |
| | | B49 | | 378 | KEFTVSGNILTI | 124-135 |
| | | B51 | 12 | 379 | MPFATPMEA | 94-102 |
| | | B52 | 5 | 380 | FATPMEAEL | 96-104 |
| | | C12 | 12 | 381 | FATPMEAELAR | 96-106 |
| | | Cw3 | 17 | 382 | LAMPFATPM | 92-100 |
| | | Cw6 | 18 | 383 | ARGPESRLL | 80-88 |
| | | DP4 | 75 | 285 | SLLMWITQCFLPVF | 157-170 |
| | | DP4 | 75 | 384 | LLEFYLAMPFATPMEAELARRSL | 87-111 |
| | | | | | AQ | |
| | | DR1 | 18 | 384 | LLEFYLAMPFATPMEAELARRSL | 87-111 |
| | | | | | AQ | |
| | | DR1 | 18 | 385 | EFYLAMPFATPM | 89-100 |
| | | DR1 | 18 | 386 | PGVLLKEFTVSGNILTIRLTAADH | 119-143 |
| | | | | | R | |
| | | DR2 | 25 | 387 | RLLEFYLAMPFA | 86-97 |
| | | DR3 | 21 | 286 | QGAMLAAQERRVPRAAEVPR | ORF2 |
| | | | | | | (14-33) |
| | | DR4 | 24 | 388 | PFATPMEAELARR | 95-107 |
| | | DR4 | 24 | 389 | PGVLLKEFTVSGNILTIRLT | 119-138 |
| | | DR4 | 24 | 390 | VLLKEFTVSG | 121-130 |
| | | DR4 | 24 | 287 | AADHRQLQLSISSCLQQL | 139-156 |
| | | DR4 | 24 | 384 | LLEFYLAMPFATPMEAELARRSL | 87-111 |
| | | | | | AQ | |
| | | DR52b | 25 | 391 | LKEFTVSGNILTIRL | 123-137 |
| | | DR7 | 25 | 386 | PGVLLKEFTVSGNILTIRLTAADH | 119-143 |
| | | | | | R | |
| | | DR7 | 25 | 384 | LLEFYLAMPFATPMEAELARRSL | 87-111 |
| | | | | | AQ | |
| | | DR8 | 4 | 392 | KEFTVSGNILT | 124-134 |
| | | DR9 | 3 | 393 | LLEFYLAMPFATPM | 87-100 |
| | | DR15 | 20 | 290 | AGATGGRGPRGAGA | 37-50 |
| Neutrophil granule | | | | 394 | VLQELNVTV | |
| proteases | | | | | | |
| OFA-iLR | | A2 | | 395 | ALCNTDSPL | |
| | | A2 | | 396 | LLAARAIVAI | |
| PTH-rP | | A2 | | 397 | TSTTSLELD | |
| | | A2 | | 398 | FLHHLIAEIH | |
| S2 | | A26 | | 399 | DLWKETVFT | |
| SAGE | | A24 | 20 | 400 | LYATVIHDI | 715-723 |
| Sp17 | | A1 | 26 | 401 | ILDSSEEDK | 103-111 |
| SSX-2 | | A2 | 44 | 402 | KASEKIFYV | 41-49 |
| | | A2 | | 403 | RLQGISPKI | |
| | | DP1 | 14 | 404 | EKIQKAFDDIAKYFSK | 19-34 |
| | | DR1 | 18 | 405 | FGRLQGISPKI | 101-111 |
| | | DR3 | 21 | 406 | WEKMKASEKIFYVYMKRK | 37-54 |
| | | DR4 | 24 | 407 | KIFYVYMKRKYEAMT | 45-59 |
| | | DR11 | 25 | 408 | KIFYVYMKRKYEAM | 45-58 |
| SSX-4 | | DP10 | 2 | 409 | INKTSGPKRGKHAWTHRLRE | 151-170 |
| | | DR3 | 21 | 410 | YFSKKEWEKMKSSEKIVYVY | 31-50 |
| | | DR8 | 4 | 411 | MKLNYEVMTKLGFKVTLPPF | 51-70 |
| | | DR8 | 4 | 412 | KHAWTHRLRERKQLVVYEEI | 161-180 |
| | | DR11 | 25 | 413 | LGFKVTLPPFMRSKRAADFH | 61-80 |
| | | DR15 | 20 | 414 | KSSEKIVYVYMKLNYEVMTK | 41-60 |
| | | DR52 | 41 | 412 | KHAWTHRLRERKQLVVYEEI | 161-180 |
| TAG | | A3 | | 415 | RLSNRLLLR | |
| TAG-1 | | A2 | 44 | 416 | SLGWLFLLL | 78-86 |
| | | B8 | 14 | 417 | LSRLSNRLL | 42-50 |
| TAG-2 | | B8 | 14 | 417 | LSRLSNRLL | 42-50 |
| | | A1, A2, | | 418 | LTYVSFRNL | |
| TPBG | | A3, B7 | | | | |
| | | A2 | | 419 | DLPAYVRNL | |
| | | A2 | | 420 | FLTGNQLAV | |
| | | A2 | | 421 | GAFEHLPSL | |
| | | A2 | | 422 | RLARLALVL | |
| | | Cw7 | | 423 | PLADLSPFA | |
| TRAG-3 | | A2 | | 424 | ILLRDAGLV | |
| | | DR1 | 18 | 425 | CEFHACWPAFTVLGE | 34-48 |
| | | DR4 | 24 | 425 | CEFHACWPAFTVLGE | 34-48 |
| | | DR7 | 25 | 425 | CEFHACWPAFTVLGE | 34-48 |
| TRP2-6b | | A2 | | 426 | ATTNILEHY | |
| TRP2-INT2g | | A68 | 8 | 427 | EVISCKLIKR | intron 2 |
| TTK | | A24 | | 428 | SYRNEIAYL | |
| XAGE-1b/GAGED2a | | A2 | 44 | 429 | RQKKIRIQL | 21-29 |
| | | DR4 | 24 | 430 | HLGSRQKKIRIQLRSQ | 17-32 |
| | | DR9 | 3 | 431 | CATWKVICKSCISQTPG | 33-49 |
| ART-4 | | A24 | | 432 | AFLRHAAL | |
| | | A24 | | 433 | DYPSLSATDI | |
| CDCA1/NUF2 | | A2 | | 434 | YMMPVNSEV | |
| | | A2 | | 435 | KLATAQFKI | |
| Cep55/c10or13 | | A24 | | 436 | VYVKGLLAKI | |
| CML28 (EXOSC5) | | A2 | | 437 | ALVDAGVPM | |
| DAM-6, -10 | | A2 | | 438 | FLWGPRAYA | |
| (MAGE-B1) | | | | | | |
| IMP-3 | | A2 | | 439 | RLLVPTQFV | |
| | | A2 | | 440 | NLSSAEVVV | |
| | | A24 | | 441 | KTVNELQNL | |
| OVA66 | | A2 | | 442 | FLPDHINIV | |
| OY-TES-1 | | A24 | | 443 | KTPFVSPLL | |
| PASD1 | | A2 | | 444 | QLLDGFMITL | |
| | | A2 | | 445 | YLVGNVCIL | |
| | | A2 | | 446 | ELSDSLGPV | |
| RHAMM/CD168 | | A2 | | 447 | ILSLELMKL | |
| | | A2 | | 448 | SLEENIVIL | |
| SART-1 | | A2 | | 449 | KGSGKMKTE | |
| | | A24 | | 450 | EYRGFTQDF | |
| SART-3 | | A2 | | 451 | RLAEYQAYI | |
| | | A2 | | 452 | LLQAEAPRL | |
| | | A3 | | 453 | WLEYYNLER | |
| | | A3 | | 454 | QIRPIFSNR | |
| | | A24 | | 455 | VYDYNCHVDL | |
| | | A24 | | 456 | AYIDFEMKI | |
| | | A26 | | 455 | VYDYNCHVDL | |
| CEA | gut carcinoma | A2 | 44 | 457 | YLSGANLNLG | 605-613 |
| | | A2 | 44 | 458 | IMIGVLVGV | 691-699 |
| | | A2 | 44 | 459 | GVLVGVALI | 694-702 |
| | | A2 | | 460 | VLYGPDAPTV | |
| | | A2 | | 461 | YLSGANLNV | |
| | | A2 | | 462 | ATVGIMIGV | |
| | | A3 | 22 | 463 | HLFGYSWYK | 61-69 |
| | | A24 | 20 | 464 | QYSWFVNGTF | 268-277 |
| | | A24 | 20 | 465 | TYACFVSNL | 652-660 |
| | | B27 | | 466 | HRWCIPWQRL | |
| | | DR3 | 21 | 467 | AYVCGIQNSVSANRS | 568-582 |
| | | DR4 | 24 | 468 | DTGFYTLHVIKSDLVNEEATGQF | 116-140 |
| | | | | | RV | |
| | | DR4 | 24 | 469 | YSWRINGIPQQHTQV | 625-639 |
| | | DR7 | 25 | 470 | TYYRPGVNLSLSC | 425-437 |
| | | DR7 | 25 | 471 | EIIYPNASLLIQN | 99-111 |
| | | DR9 | 3 | 472 | YACFVSNLATGRNNS | 653-667 |
| | | DR11 | 25 | 473 | LWWVNNQSLPVSP | 177-189 |
| | | | | | | and |
| | | | | | | 355-367 |
| | | DR13 | 19 | 473 | LWWVNNQSLPVSP | 177-189 |
| | | | | | | and |
| | | | | | | 355-367 |
| | | DR14 | 6 | 473 | LWWVNNQSLPVSP | 177-189 |
| | | | | | | and |
| | | | | | | 355-367 |
| | | DR14 | 6 | 471 | EIIYPNASLLIQN | 99-111 |
| | | DR14 | 6 | 474 | NSIVKSITVSASG | 666-678 |
| gp100 / Pmel17 | melanoma | A2 | 44 | 475 | KTWGQYWQV | 154-162 |
| | | A2 | 44 | 476 | (A)MLGTHTMEV | 177(8)-186 |
| | | A2 | | 477 | IMDQVPFSV | |
| | | A2 | 44 | 158 | ITDQVPFSV | 209-217 |
| | | A2 | 44 | 478 | YLEPGPVTA | 280-288 |
| | | A2 | 44 | 479 | LLDGTATLRL | 457-466 |
| | | A2 | 44 | 480 | VLYRYGSFSV | 476-485 |
| | | A2 | 44 | 481 | SLADTNSLAV | 570-579 |
| | | A2 | 44 | 482 | RLMKQDFSV | 619-627 |
| | | A2 | 44 | 483 | RLPRIFCSC | 639-647 |
| | | A3 | 22 | 484 | LIYRRRLMK | 614-622 |
| | | A3 | 22 | 485 | ALLAVGATK | 17-25 |
| | | A3 | 22 | 486 | IALNFPGSQK | 86-95 |
| | | A3 | 22 | 487 | RSYVPLAHR | 195-202 and |
| | | | | | | 191 or 192e |
| | | A3 | 22 | 488 | ALNFPGSQK | 87-95 |
| | | A11 | 13 | 488 | ALNFPGSQK | 87-95 |
| | | A24 | 20 | 489 | VYFFLPDHL | intron 4 |
| | | A32 | 8 | 490 | RTKQLYPEW | 40-42 |
| | | | | | | and |
| | | | | | | 47-52e |
| | | A68 | 8 | 491 | HTMEVTVYHR | 182-191 |
| | | B7 | 17 | 492 | SSPGCQPPA | 529-537 |
| | | B35 | 20 | 493 | VPLDCVLYRY | 471-480 |
| | | B35 | 20 | 494 | LPHSSSHWL | 630-638 |
| | | Cw8 | -c | 495 | SNDGPTLI | 71-78 |
| | | DQ6 | 63 | 496 | GRAMLGTHTMEVTVY | 175-189 |
| | | DR4 | 24 | 497 | WNRQLYPEWTEAQRLD | 44-59 |
| | | DR7 | 25 | 498 | TTEWVETTARELPIPEPE | 420-437 |
| | | DR7 | 25 | 499 | TGRAMLGTHTMEVTVYH | 174-190 |
| | | DR53 | 49 | 496 | GRAMLGTHTMEVTVY | 175-189 |
| mammaglobin-A | breast cancer | A2 | | 500 | FLNQTDETL | |
| | | A2 | | 501 | MQLIYDSSL | |
| | | A2 | | 502 | KLLMVLMLA | |
| | | A2 | | 503 | LIYDSSLCDL | |
| | | A3 | | 504 | AIDELKECF | |
| | | A3 | | 505 | TTNAIDELK | |
| | | A3 | 22 | 506 | PLLENVISK | 23-31 |
| | | A3 | | 502 | KLLMVLMLA | |
| Melan-A / MART-1 | melanoma | A2 | 44 | 160 | (E)AAGIGILTV | 26(27)-35 |
| | | A2 | 44 | 507 | ILTVILGVL | 32-40 |
| | | B35 | 20 | 160 | EAAGIGILTV | 26-35 |
| | | B45 | 2 | 508 | AEEAAGIGIL(T) | 24-33(34) |
| | | Cw7 | 41 | 509 | RNGYRALMDKS | 51-61 |
| | | DP5 | 3 | 510 | YTTAEEAAGIGILTVILGVLLLIGC | 21-50 |
| | | | | | WYCRR | |
| | | DQ6 | 63 | 511 | EEAAGIGILTVI | 25-36 |
| | | DR1 | 18 | 512 | AAGIGILTVILGVL | 27-40 |
| | | DR1 | 18 | 513 | APPAYEKLPSAEQF | 100-111 |
| | | DR3 | 21 | 511 | EEAAGIGILTVI | 25-36 |
| | | DR4 | 24 | 514 | RNGYRALMDKSLHVGTQCALTR | 51-73 |
| | | | | | R | |
| | | DR11 | 25 | 515 | MPREDAHFIYGYPKKGHGHS | 1-20 |
| | | DR52 | 41 | 516 | KNCEPVVPNAPPAYEKLSAE | 91-110 |
| MC1R | | A2 | | 517 | TILLGIFFL | |
| | | A3 | | 518 | FLALIICNA | |
| Mesothelin | | A2 | | 519 | KLLGPHVEGL | |
| | | A2 | | 520 | KLLGPHVLGV | |
| NGEP | | A2 | | 521 | GLFDEYLEMV | |
| NY-BR-1 | breast cancer | A2 | 44 | 522 | SLSKILDTV | 904-912 |
| | | A2 | | 523 | LLSHGAVIEV | |
| OA1 | melanoma | A24 | 20 | 524 | LYSACFWWL | 126-134 |
| PAP | prostate cancer | A2 | 44 | 525 | FLFLLFFWL | 18-26 |
| | | A2 | 44 | 526 | TLMSAMTNL | 112-120 |
| | | A2 | 44 | 527 | ALDVYNGLL | 299-307 |
| P Polypeptide | | A2 | | 528 | IMLCLIAAV | |
| PSA | prostate carcinoma | A2 | 44 | 529 | FLTPKKLQCV | 165-174 |
| | | A2 | 44 | 530 | VISNDVCAQV | 178-187 |
| RAB38 /NY-MEL-1 | melanoma | A2 | 44 | 531 | VLHWDPETV | 50-58 |
| TARP | | A2 | | 532 | FLRNFSLMV | |
| | | A2 | | 533 | FVFLRNFSL | |
| | | A2 | | 534 | FLRNFSLML | |
| TRP-1 / gp75 | melanoma | A31 | 5 | 535 | MSLQRQFLR | alt. ORF |
| | | DR4 | 24 | 536 | ISPNSVFSQWRVVCDSLEDYD | 277-297 |
| | | DR15 | 20 | 537 | SLPYWNFATG | 245-254 |
| | | DR17 | 21 | 538 | SQWRVVCDSLEDYDT | 284-298 |
| TRP-2 | melanoma | A1, A2 | | 539 | VYDFFVWLHY | |
| | | A2 | | 540 | SLDDYNHLV | |
| | | A2 | | 541 | FVWLHYYSV | |
| | | A2 | 44 | 542 | SVYDFFVWL | 180-188 |
| | | A2 | 44 | 543 | TLDSQVMSL | 360-368 |
| | | A31 | 5 | 544 | LLGPGRPYR | 197-205 |
| | | A33 | 5 | 544 | LLGPGRPYR | 197-205 |
| | | Cw8 | -c | 545 | ANDPIFVVL | 387-395 |
| | | DR3 | 21 | 546 | QCTEVRADTRPWSGP | 60-74 |
| | | DR15 | 20 | 547 | ALPYWNFATG | 241-250 |
| tyrosinase | melanoma | A1 | 26 | 548 | KCDICTDEY | 243-251 |
| | | A1 | | 549 | DSDPDSFQDY | |
| | | A1 | 26 | 550 | SSDYVIPIGTY | 146-156 |
| | | A2 | 44 | 551 | MLLAVLYCL | 1-9 |
| | | A2 | 44 | 552 | CLLWSFQTSA | 8-17 |
| | | A2 | 44 | 159 | YMDGTMSQV | 369-377 |
| | | A24 | 20 | 553 | AFLPWHRLF | 206-214 |
| | | A24 | 20 | 554 | IYMDGTADFSF | 368-373 and |
| | | | | | | 336-340e |
| | | A26 | 8 | 555 | QCSGNFMGF | 90-98 |
| | | B35 | 20 | 556 | TPRLPSSADVEF | 309-320 |
| | | B35 | 20 | 557 | LPSSADVEF | 312-320 |
| | | B38 | 5 | 558 | LHHAFVDSIF | 388-397 |
| | | B44 | 21 | 559 | SEIWRDIDFD | 192-200 |
| | | DR4 | 24 | 560 | QNILLSNAPLGPQFP | 56-70 |
| | | DR4 | 24 | 561 | SYLQDSDPDSFQD | 450-462 |
| | | DR15 | 20 | 562 | [sequence omitted] | 386-406 |
| human chorionic | Differentiation | | | | | |
| gonadotropin | | | | | | |
| P501s (prostein) | Differentiation | Cw5 | | 563 | SACDVSVRVV | |
| | | Cw5 | | 564 | YTDFVGEGL | |
| ADAM17 | | A2 | | 565 | YLIELIDRV | |
| adipophilin | adipocytes, | A2 | 44 | 566 | SVASTITGV | 129-137 |
| | macrophages | | | | | |
| ADP-ribosylation | | A2 | | 567 | CITFQVWDV | |
| factor | | A2 | | 568 | FLPHFQALHV | |
| AIM-2 | ubiquitous (low level) | A1 | 26 | 569 | RSDSGQQARY | intron |
| ALDH1A1 | mucosa, keratinocytes | A2 | 44 | 570 | LLYKLADLI | 88-96 |
| ALK | | A2 | | 571 | SLAMLDLLHV | |
| ATIC (AICRT) | | A2 | | 572 | MVYDLYKTL | |
| | | A2 | | 573 | RLDFNLIRV | |
| BA46 (MFGE8) | | A2 | | 574 | GLQHWVPEL | |
| | | A2 | | 575 | NLFETPVEA | |
| BAP31 | | A2 | | 576 | KLDVGNAEV | |
| BAX-delta | | A2 | | 577 | YLLQGMIAAV | |
| | | A2 | | 578 | YLQGMIAAV | |
| Bcl-2 | | A2 | | 579 | PLFDFSWLSL | |
| | | A2 | | 580 | WLSLKTLLSL | |
| BCLX (L) | ubiquitous (low level) | A2 | 44 | 581 | YLNDHLEPWI | 173-182 |
| BING-4 | ubiquitous (low level) | A2 | 44 | 582 | CQWGRLWQL | ORF2 |
| BTBD2 | | A24 | | 583 | VFLPCDSWNL | |
| C19orf48 | | A2 | | 584 | CIPPDSLLFPA | |
| CA125 | | A2 | | 585 | YTLDRDSLYV | |
| Cadherin 3/P- | | A2 | | 586 | FIIENLKAA | |
| cadherin | | A2 | | 587 | FILPVLGAV | |
| CALCA | thyroid | A2 | 44 | 588 | VLLQAGSLHA | 16-25 |
| CLCA2 | | A2 | | 589 | LLGNCLPTV | |
| | | A2 | | 590 | SLQALKVTV | |
| CLP (coactosin-like | | A2 | | 591 | NLVRDDGSAV | |
| protein) | | A2 | 592 | | RLFAFVRFT | |
| | | A2 | 593 | | VVQNFAKEFV | |
| CD45 | proliferating cells, | A24 | 20 | 594 | KFLDALISL | 556-564 |
| | testis, multiple tissues | | | | | |
| | (low level) | | | | | |
| CD274 | multiple tissues (lung, | A2 | 44 | 595 | LLNAFTVTV | 15-23 |
| | heart, . . . ) and | | | | | |
| | induced by IFN-γ | | | | | |
| CDKN1A | | A2 | | 596 | FAWERVRGL | |
| | | A2 | | 597 | GLGLPKLYL | |
| | | A2 | | 598 | LMAGCIQEA | |
| Cdr2 | | A2 | | 599 | LLEEMFLTV | |
| CPSF | ubiquitous (low level) | A2 | 44 | 600 | KVHPVIWSL | 250-258 |
| | | A2 | 44 | 601 | LMLQNALTTM | 1360-1369 |
| c-MET | | A2 | | 602 | YVDPVITSI | |
| COA-1 (UBXN11) | | A2 | | 603 | FMTRKLWDL | |
| | | A2 | | 604 | RLLASLQDL | |
| Cox2 | | A2 | | 605 | ALYGDIDAV | |
| | | A3 | | 605 | ALYGDIDAV | |
| Cyclin I | | A2 | | 606 | LLDRFLATV | |
| cyclin B1 | | A2 | | 607 | ILIDWLVQV | |
| | | A2 | | 608 | AKYLMELTM | |
| | | A2 | | 609 | AGYLMELCC | |
| cyclin D1 | ubiquitous (low level) | A2 | 44 | 610 | LLGATCMFV | 101-109 |
| | | DR4 | 24 | 611 | NPPSMVAAGSVVAAV | 198-212 |
| cyclophilin B (Cyp- | | A2 | | 612 | VLEGMEVV | |
| B) | | A2 | | 613 | KLKHYGPGWV | |
| | | A24 | | 614 | DFMIQGGDF | |
| | | A24 | | 615 | KFHRVIKDF | |
| CYP1B1 | | A2 | | 616 | WLQYFPNPV | |
| DKK1 | testis, prostate, | A2 | 44 | 617 | ALGGHPLLGV | 20-29 |
| | mesenchymal stem | | | | | |
| | cells | | | | | |
| EGFR | | A2 | | 618 | ITDFGLAKL | |
| | | A2 | | 618 | ITDFGLAKL | |
| ENAH (hMena) | breast, prostate stroma | A2 | 44 | 619 | TMNGSKSPV | 502-510 |
| | and epithelium of | | | | | |
| | colon-rectum, pancreas, | | | | | |
| | endometrium | | | | | |
| EpCAM | epithelial cells | A2 | | 620 | YQLDPKFIV | |
| | | A2 | | 621 | GLKAGVIAV | |
| | | A2 | | 622 | ILYENNVITV | |
| | | A2 | | 623 | ILYENNVIV | |
| | | A24 | 20 | 624 | RYQLDPKFI | 173-181 |

EphA2

| | | | | | | |
|---|---|---|---|---|---|---|
| | | A2 | | 625 | VLLLVLAGV | |
| | | A2 | | 626 | TLADFDPRV | |
| | | A2 | | 627 | VLAGVGFFI | |
| | | A2 | | 628 | IMNDMPIYM | |
| EphA3 | many | DR11 | 25 | 629 | DVTFNIICKKCG | 356-367 |
| EZH2 | ubiquitous (low level) | A2 | 44 | 630 | FMVEDETVL | 120-128 |
| | | A2 | 44 | 631 | FINDEIFVEL | 165-174 |
| | | A24 | 20 | 632 | KYDCFLHPF | 291-299 |
| | | A24 | 20 | 633 | KYVGIEREM | 735-743 |
| FGF5 | brain, kidney | A3 | 22 | 634 | NTYASPRFKF | 172-176 |
| | | | | | | and |
| | | | | | | 217-220 |
| glypican-3 | placental and multiple | A2 | 44 | 635 | FVGEFFTDV | 144-152 |
| | tissues | A24 | 20 | 636 | EYILSLEEL | 298-306 |
| G250 / MN / CAIX | stomach, liver, | A2 | 44 | 637 | HLSTAFARV | 254-262 |
| | pancreas | | | | | |
| HBD | | A24 | | 638 | KYLKLSSSEL | |
| hCG-beta | | A2 | | 639 | TMTRVLQGV | |
| | | A2 | | 640 | GVNPVVSYAV | |
| | | A2 | | 641 | VLQVGLPAL | |
| Heparanase | | A2 | | 642 | PAFSYSFFV | |
| | | A2 | | 643 | LLLGPLGPL | |
| | | A2 | | 644 | KMLKSFLKA | |
| | | A2 | | 645 | ALPPPLMLL | |
| | | A2 | | 646 | WLSLLFKKL | |
| HER-2 / neu | ubiquitous (low level) | A2 | 44 | 647 | KIFGSLAFL | 369-377 |
| | | A2 | 44 | 648 | IISAVVGIL | 654-662 |
| | | A2 | 44 | 649 | ALCRWGLLL | 5-13 |
| | | A2 | 44 | 650 | ILHNGAYSL | 435-443 |
| | | A2 | 44 | 651 | RLLQETELV | 689-697 |
| | | A2 | 44 | 652 | VVLGVVFGI | 665-673 |
| | | A2 | 44 | 653 | YMIMVKCWMI | 952-961 |
| | | A2 | 44 | 654 | HLYQGCQVV | 48-56 |
| | | A2 | 44 | 655 | YLVPQQGFFC | 1023-1032 |
| | | A2 | 44 | 656 | PLQPEQLQV | 391-399 |
| | | A2 | 44 | 657 | TLEEITGYL | 402-410 |
| | | A2 | 44 | 658 | ALIHHNTHL | 466-474 |
| | | A2 | 44 | 659 | PLTSIISAV | 650-658 |
| | | A2 | | 660 | KLFGSLAFV | |
| | | A2 | | 661 | ITDFGLARL | |
| | | A2 | | 662 | KVFGSLAFV | |
| | | A2 | | 663 | AVVGILLVV | |
| | | A2 | | 664 | QLFEDNYAL | |
| | | A2 | | 665 | QIAKGMSYL | |
| | | A2 | | 666 | LIAHNQVRQV | |
| | | A3 | 22 | 667 | VLRENTSPK | 754-762 |
| | | A24 | 20 | 668 | TYLPTNASL | 63-71 |
| HIFPH3 | | A24 | | 669 | RYAMTVWYF | |
| HLA-DOB | B lymphocytes, | A2 | 44 | 670 | FLLGLIFLL | 232-240 |
| | monocytes, blood cells, | | | | | |
| | adrenal | | | | | |
| HM1.24 | | A2 | | 671 | LLLGIGILV | |
| HMW-MAA | | A2 | | 672 | LLQLGYSGRL | |
| | | A2 | | 673 | LLQLYSGRL | |
| Hepsin | kidney, liver, skin | A2 | 44 | 674 | SLLSGDWVL | 191-199 |
| | | A2 | 44 | 675 | GLQLGVQAV | 229-237 |
| | | A2 | 44 | 676 | PLTEYIQPV | 268-276 |
| HO-1 | | B8 | | 677 | APLLRWVL | |
| Hsp70 | | A2 | | 678 | LLLLDVAPL | |
| | | A2 | | 679 | LLDVAPLSL | |
| HST-2 (FGF-6) | | A31 | | 680 | YSWMDISCWI | |
| ICE | | B7 | | 681 | SPRWWPTCL | |
| IDO1 | lymph nodes, placenta, | A2 | 44 | 682 | ALLEIASCL | 199-207 |
| | and many cell types in | | | | | |
| | the course of | | | | | |
| | inflammatory response | | | | | |
| IEX-1 | | A11 | | 683 | APAGRPSASR | |
| | | A11 | | 684 | RSRRVLYPR | |
| | | A31 | | 684 | RSRRVLYPR | |
| | | A31 | | 683 | APAGRPSASR | |
| | | A33 | | 684 | RSRRVLYPR | |
| | | A33 | | 685 | APAGRPSAS | |
| | | A33 | | 686 | VLYPRVVRR | |
| IGF2B3 | ubiquitous (low level) | A2 | 44 | 440 | NLSSAEVVV | 515-523 |
| | | A3 | 44 | 439 | RLLVPTQFV | 199-207 |
| IL13Ralpha2 | | A2 | 44 | 687 | WLPFGFILI | 345-353 |
| | | A24 | | 688 | WYEGLDHAL | |
| integrin beta subunit | | A2 | | 689 | ALMEQQHYV | |
| Intestinal carboxyl | liver, intestine, kidney | B7 | 17 | 681 | SPRWWPTCL | alt. ORF |
| esterase | | | | | | |
| alpha-foetoprotein | liver | A2 | 44 | 690 | GVALQTMKQ | 542-550 |
| | | A2 | 44 | 691 | FMNKFIYEI | 158-166 |
| | | A2 | | 692 | GLSPNLNRFL | |
| | | A2 | | 693 | PLFQVPEPV | |
| | | A3 | | 694 | ILLWAARYD | |
| | | A24 | | 695 | EYSRRHPQL | |
| | | A24 | | 696 | AYTKKAPQL | |
| | | A24 | | 697 | EYYLQNAFL | |
| | | A24 | | 698 | KYIQESQAL | |
| | | A24 | | 699 | RSCGLFQKL | |
| | | DR13 | 19 | 700 | QLAVSVILRV | 364-373 |
| JARID1B | | A2 | | 701 | QLYALPCVL | |
| Keratin 18 | | A2 | | 702 | ALLNIKVKL | |
| Kallikrein 4 | prostate and ovarian | A2 | 44 | 703 | FLGYLILGV | 11-19 |
| | cancer | DP4 | 75 | 704 | SVSESDTIRSISIAS | 125-139 |
| | | DR4 | 24 | 705 | LLANGRMPTVLQCVN | 155-169 |
| | | DR7 | 25 | 706 | RMPTVLQCVNVSVVS | 160-174 |
| KIF20A | ubiquitous (low level) | A2 | 44 | 707 | LLSDDDVVV | 12-20 |
| | | A2 | 44 | 708 | AQPDTAPLPV | 284-293 |
| | | A2 | 44 | 709 | CIAEQYHTV | 809-817 |
| L10a | | A26 | | 710 | ETVELQISL | |
| | | A26 | | 711 | TLYEAVREV | |
| Lck | | A2 | | 712 | KLVERLGAA | |
| | | A2 | | 713 | DVWSFGILL | |
| | | A24 | | 714 | TFDYLRSVL | |
| | | A24 | | 715 | HYTNASDGL | |
| | | A24 | | 716 | DYLRSVLEDF | |
| Livin (ML-IAP) | | A2 | | 717 | QLCPICRAPV | |
| | | A2 | | 718 | RLASFYDWLP | |
| | | A2 | | 719 | SLGSPVLGL | |
| LRRC8A | | B7 | | 720 | GPRESRPPA | |
| Lengsin | eye lens and low level | A2 | 44 | 721 | FLPEFGISSA | 270-279 |
| | in multiple tissues | | | | | |
| M2BP | | A2 | | 722 | RIDITLSSV | |
| | | A24 | | 723 | GYCASLFAIL | |
| M-CSF | liver, kidney | B35 | 20 | 724 | LPAVVGLSPGEQEY | alt. ORF |
| MCSP | endothelial cells, | DR11 | 25 | 725 | VGQDVSVLFRVTGALQ | 693-708 |
| | chondrocytes, smooth | | | | | |
| | muscle cells | | | | | |
| mdm-2 | ubiquitous (brain, | A2 | 44 | 726 | VLFYLGQY | 53-60 |
| | muscle, lung) | A2 | | 727 | LLGDLFGV | |
| Meloe | ubiquitous (low level) | A2 | 44 | 728 | TLNDECWPA | 36-44 |
| | | DQ2 | 41 | 729 | ERISSTLNDECWPA | 31-44 |
| | | DQ6 | 63 | 405 | FGRLQGISPKI | 32-44 |
| | | DR1 | 18 | 730 | TSREQFLPSEGAA | 11-23 |
| | | DR11 | 25 | 731 | CPPWHPSERISSTL | 24-37 |
| Meloe-2 | | A2 | | 732 | RLPPKPPLA | |
| | | A2 | | 733 | RCPPKPPLA | |
| MG50 | | A2 | | 734 | TLKCDCEIL | |
| | | A2 | | 735 | RLGPTLMCL | |
| | | A2 | | 736 | LLLEAVPAV | |
| | | A2 | | 737 | WLPKILGEV | |
| | | A2 | | 738 | VLSVNVPDV | |
| | | A2 | | 739 | CMHLLLEAV | |
| Midkine | ubiquitous (low level) | A2 | 44 | 740 | ALLALTSAV | 13-21 |
| | | A2 | 44 | 741 | AQCQETIRV | 114-122 |
| | | DR4 | 24 | 742 | LTLLALLALTSAVAK | 12-23 |
| MMP-2 | ubiquitous | A2 | 44 | 743 | GLPPDVQRVH | 560-568 |
| MMP-7 | ubiquitous (low level) | A3 | 22 | 744 | SLFPNSPKWTSK | 96-107 |
| MPP-11 | | A2 | | 745 | QLLIKAVNL | |
| | | A2 | | 746 | STLCQVEPV | |
| MRP3 | | A24 | | 747 | AYVPQQAWI | |
| | | A24 | | 748 | VYSDADIFL | |
| | | A24 | | 749 | NYSVRYRPGL | |
| | | A24 | | 750 | LYAWEPSFL | |
| MUC1 | glandular epithelia | A2 | 44 | 751 | STAPPVHNV | 950-958 |
| | | A2 | 44 | 752 | LLLLTVLTV | 12-20 |
| | | A11 | | 753 | STAPPAHGV | |
| | | A68 | | 754 | DVTSAPDNK | |
| | | B7 | | 755 | VPGWGIALL | |
| | | B7 | | 756 | DPSTDYYQEL | |
| | | B44 | | 757 | TEAASRYNL | |
| | | DR3 | 21 | 758 | PGSTAPPAHGVT | repeated |
| | | | | | | region |
| MUC5AC | surface mucosal cells, | A24 | 20 | 759 | TCQPTCRSL | 716-724 |
| | respiratory tract, and | | | | | |
| | stomach epithelia | | | | | |
| Nucleophosmin | | A1 | | 760 | GCELKADKDY | |
| P15 | | A24 | | 761 | AYGLDFYIL | |
| p53 | ubiquitous (low level) | A2 | 44 | 762 | LLGRNSFEV | 264-272 |
| | | A2 | 44 | 763 | RMPEAAPPV | 65-73 |
| | | A2 | | 764 | LLPENNVLSPV | |
| | | A2 | | 765 | SLPPPGTRV | |
| | | A2 | | 257 | VVPCEPPEV | |
| | | A2 | | 766 | YLGSYGFRL | |
| | | A2 | | 767 | SMPPPGTRV | |
| | | A2 | | 768 | GLAPPQHLIRV | |
| | | A2 | | 769 | KLCPVQLWV | |
| | | A2 | | 770 | KTCPVQLWV | |
| | | A24 | | 771 | AIYKQSQHM | |
| | | B46 | 0.1 | 772 | SQKTYQGSY | 99-107 |
| | | Cw7 | | 773 | TRVLAMAIY | |
| | | DP5 | 3 | 774 | PGTRVRAMAIYKQ | 153-165 |
| | | DR14 | 6 | 775 | HLIRVEGNLRVE | 193-204 |
| PAK2 | | A2 | | 776 | KLAKPLSSL | |
| | | A2 | | 777 | VLLGMEGSV | |
| Papillomavirus | | A2 | | 778 | ALPSFQIPV | |
| binding | | | | | | |
| PAX3 | | A2 | | 779 | QLMAFNHLV | |
| PAX5 | hemopoietic system | A2 | 44 | 780 | TLPGYPPHV | 311-319 |
| PBF | ovary, pancreas, spleen, | B55 | 4 | 781 | CTACRWKKACQR | 499-510 |
| | liver | | | | | |
| PGK1 | | A2 | | 782 | IIGGGMAFT | |
| PRAME | testis, ovary, | A2 | 44 | 783 | VLDGLDVLL | 100-108 |
| | endometrium, adrenals | A2 | 44 | 784 | SLYSFPEPEA | 142-151 |
| | | A2 | 44 | 785 | ALYVDSLFFL | 300-309 |
| | | A2 | 44 | 786 | SLLQHLIGL | 425-433 |
| | | A24 | 20 | 787 | LYVDSLFFLC | 301-309 |
| | | B52 | | 788 | GQHLHLETF | |
| PRDI-BF1 | | A2 | | 789 | FGLFPRLCPV | |
| Preprocalcitonin | | A2 | | 588 | VLLQAGSLHA | |
| (ppCT) | | | | | | |
| Prostatic acid | | | | 527 | ALDVYNGLL | |
| phosphatase | | | | 525 | FLFLLFFWL | |
| | | | | 526 | TLMSAMTNL | |
| | | | | 790 | ILLWQPIPV | |
| | | | | 791 | YLPFRNCRP | |
| | | | | 791 | YLPFRNCRP | |
| PSMA | prostate, CNS, liver | A1 | | 792 | HSTNGVTRIY | |
| | | A2 | | 793 | VLAGGFFLL | |
| | | A24 | | 794 | LYSDPADYF | |
| | | A24 | 20 | 795 | NYARTEDFF | 178-186 |
| RAGE-1 | retina | A2 | 44 | 796 | LKLSGVVRL | 352-360 |
| | | A2 | 44 | 797 | PLPPARNGGLG | 32-40 |
| | | B7 | 17 | 798 | SPSSNRIRNT | 11-20 |
| Ran | | A2 | | 799 | YMFDVTSRV | |
| | | A2 | | 800 | IMFDVTSRV | |
| | | A33 | | 801 | HPLVFHTNR | |
| | | A33 | | 802 | IIMFDVTSR | |
| | heart, skeletal muscle, | A2 | 44 | 803 | LAALPHSCL | 5-13 |
| RGS5 | pericytes | A3 | 22 | 804 | GLASFKSFLK | 74-83 |
| | | B8 | | 805 | MAQKRIHAL | |
| Ribosomal protein | | A31 | | 806 | KNKRILMEH | |
| L19 | | | | | | |
| RhoC | ubiquitous (low level) | A3 | 22 | 807 | RAGLQVRKNK | 176-185 |
| RNF43 | | A2 | 44 | 808 | ALWPWLLMA(T) | 11-19(20) |
| | | A24 | 20 | 809 | NSQPVWLCL | 721-729 |
| RU2AS | testis, kidney, bladder | B7 | 17 | 810 | LPRWPPPQL | antisense |
| SART-2 | | A24 | | 811 | DYSARWNEI | |
| | | A24 | | 812 | AYDFLYNYL | |
| | | A24 | | 813 | SYTRLFLIL | |
| secemin 1 | ubiquitous | A2 | 44 | 814 | KMDAEHPEL | 196-204 |
| SH3GLB2 | | A2 | | 815 | FLTPLRNFL | |
| SOX4 | | Cw*14 | | | | |
| | | 02 | | | | |
| SOX10 | ubiquitous (low level) | A2 | 44 | 816 | AWISKPPGV | 332-340 |
| | | A2 | 44 | 817 | SAWISKPPGV | 331-340 |
| SPARC | | A24 | | 818 | MYIFPVHWQF | |
| | | A24 | | 819 | DYIGPCKYI | |
| STAT1-alpha/beta | | A2 | | 820 | KLQELNYNL | |
| STEAP1 | prostate | A2 | 44 | 821 | MIAVFLPIV | 292-300 |
| | | A2 | | 822 | FLYTLLREV | |
| | | A2 | | 823 | LLLGTIHAL | |
| | | A2 | 44 | 824 | HQQYFYKIPILVINK | 102-116 |
| survivin | ubiquitous | A2 | 44 | 825 | ELTLGEFLKL | 95-104 |
| | | A2 | | 826 | QMFFCFKEL | |
| | | A2 | | 827 | LMLGEFLKL | |
| | | A2 | | 828 | TLPPAWQPFL | |
| | | DR1 | 18 | 829 | TLGEFLKLDRERAKN | 97-111 |
| survivin-2B | | A24 | | 830 | AYACNTSTL | |
| Telomerase | testis, thymus, bone | A2 | 44 | 831 | ILAKFLHWL | 540-548 |
| | marrow, lymph nodes | A2 | 44 | 832 | RLVDDFLLV | 865-873 |
| | | A2 | | 833 | LLTSRLRFI | |
| | | A2 | | 834 | RLFFYRKSV | |
| | | A3 | | 835 | KLFGVLRLK | |
| | | DR7 | 25 | 836 | RPGLLGASVLGLDDI | 672-686 |
| | | DR11 | 25 | 837 | LTDLQPYMRQFVAHL | 766-780 |
| Tie2 | | A2 | | 838 | FLPATLTMV | |
| Topoisomerase II | | A2 | | 839 | FLYDDNQRV | |
| TRG | | B52 | | 840 | YQLCLTNIF | |
| | | B62 | | 840 | YQLCLTNIF | |
| TPBG | multiple tissues | A2 | 44 | 422 | RLARLALVL | 17-25 |
| | (including esophagus, | | | | | |
| | bladder) | | | | | |
| TYMS | | A2 | | 841 | LMALPPCHAL | |
| VEGF | ubiquitous (low level) | B27 | 7 | 842 | SRFGGAVVR | -i |
| VEGFR2/KDR | | A2 | | 843 | FLSTLTIDGV | |
| WHSC2 | | A26 | | 844 | ASLDSDPWV | |
| WNK2/ppMAPkkk | | A26 | | 845 | DLLSHAFFA | |
| WT1 | testis, ovary, bone | A1 | 26 | 846 | TSEKRPFMCAY | 317-327 |
| | marrow, spleen | A2 | | 847 | RMFPNAPYL | |
| | | A2 | | 848 | YMFPNAPYL | |
| | | A24 | 20 | 849 | CMTWNQMNL | 235-243 |
| | | A24 | | 850 | CYTWNQMNL | |
| | | A24 | | 851 | RWPSCQKKF | |
| | | DP5 | 3 | 852 | LSHLQMHSRKH | 337-347 |
| | | DP5 | 3 | 853 | KRYFKLSHLQMHSRKH | 332-347 |
| | | DR4 | 24 | 853 | KRYFKLSHLQMHSRKH | 332-347 |
| XBP1 | | A2 | | 854 | LLSGQPASA | |
| CD33 | | | | | | |
| CD123 | | | | | | |
| CD38 | | | | | | |
| gastrin-17 | | | | | | |
| guanylyl cyclase C | | | | | | |
| HNRPL | | A26 | | 855 | NVLHFFNAPL | |
| EHD2 | | A3 | | 856 | KLPNSVLGR | |
| 707-AP | | A2 | | 857 | RVAALARDAP | |
| mAb MF11-30 VH | | A2 | | 858 | LLVLLYSKL | |
| Replication protein A | | A2 | | 859 | YLMDTSGKV | |
| RU1 | | B51 | | 860 | VPYGSFKHV | |
| septin 2, Nedd5 | | A2 | | 861 | RLYPWGVVEV | |
| SGT1B | | B39 | | 862 | CHILLGNYC | |
| MOG | | | | 863 | MEVGWYRSPFSRVVHLYRNGK | 35-55 |
| Epstein Barr Virus | | A2 | | 152 | CLGGLLTMV | |
| | | A2 | | 153 | GLCTLVAML | |
| | | A2 | | 864 | FLYALALLL | |
| | | A2 | | 865 | YVLDHLIVV | |
| | | A3 | | 146 | RLRAEAQVK | |
| | | A11 | | 866 | AVFDRKSDAK | |
| | | B7 | | 867 | RPPIFIRLL | |
| | | A2 | | 868 | VLQWASLAV | |
| | | | | 869 | FMVFLQTHI | |
| | | | | 870 | FLQTHIFAEV | |
| | | | | 871 | SIVCYFMVFL | |
| Cytomegalovirus | | A1 | | 872 | YSEHPTFTSQY | |
| | | A1 | | 873 | VTEHDTLLY | |
| | | A2 | | 155 | NLVPMVATV | |
| | | A2 | | 874 | VLEETSVML | |
| | | A3 | | 875 | TTVYPPSSTAK | |
| | | A11 | | 876 | GPISGHVLK | |
| | | B7 | | 877 | TPRVTGGGAM | |
| | | B7 | | 878 | RPHERNGFTV | |
| Influenza virus | | A1 | | 879 | VSDGGPNLY | |
| | | A2 | | 880 | GILGFVFTL | |
| | | A2 | | 43 | TIHDIILECV | 29-38 |
| Human papilloma | | A2 | | 41 | YMLDLQPET | 11-19 |
| virus | | A2 | | 168 | YMLDLQPETT | 11-20 |

[0229] In some embodiments, the exogenous antigenic polypeptide comprises or consist of a neoantigen polypeptide provided in Tables 16 and 17, or a fragment or variant thereof, or an antibody molecule thereto. Table 17 provides non-limiting examples of HLA polypeptide alleles that may be incorporated into a wild-type or loadable exogenous antigen-presenting polypeptide described herein, for binding to the specified neoantigen polypeptide.

[0230] In other embodiments, the exogenous antigenic polypeptide is an exogenous antigenic polypeptide derived from any one of the antigens disclosed herein. For example, in some embodiments the exogenous antigenic polypeptide is an exogenous antigenic polypeptide from an antigen selected from the antigens disclosed in Tables 7-8 and 16-26 and Table B. In some embodiments, the exogenous antigenic polypeptide is an antigenic polypeptide from an antigen selected from the antigens disclosed in Table 16. In some embodiments, the exogenous antigenic polypeptide is an antigenic polypeptide from an antigen selected from the antigens disclosed in Table 17. In some embodiments, the exogenous antigenic polypeptide is an antigenic polypeptide from an antigen selected from the antigens disclosed in Table 18. In some embodiments, the exogenous antigenic polypeptide is an antigenic polypeptide from an antigen selected from the antigens disclosed in Table 19. In some embodiments, the exogenous antigenic polypeptide is an antigenic polypeptide from an antigen selected from the antigens disclosed in Table 20. In some embodiments, the exogenous antigenic polypeptide is an antigenic polypeptide from an antigen selected from the antigens disclosed in Table 21. In some embodiments, the exogenous antigenic polypeptide is an antigenic polypeptide from an antigen selected from the antigens disclosed in Table 22 In some embodiments, the exogenous antigenic polypeptide is an antigenic polypeptide from an antigen selected from the antigens disclosed in Table 23 In some embodiments, the exogenous antigenic polypeptide is an antigenic polypeptide from an antigen selected from the antigens disclosed in Table 24. In some embodiments, the exogenous antigenic polypeptide is an antigenic polypeptide from an antigen selected from the antigens disclosed in Table 25. In some embodiments, the exogenous antigenic polypeptide is an antigenic polypeptide from an antigen selected from the antigens disclosed in Table 26. In some embodiments, the exogenous antigenic polypeptide is an antigenic polypeptide from an antigen selected from the antigens disclosed in Table B.

[0231] In some embodiments, an engineered erythroid cell or enucleated cell of the present disclosure comprises one or more exogenous antigenic polypeptides, wherein the one or more exogenous antigenic polypeptides is an HPV antigen. In some embodiments, an engineered erythroid cell or enucleated cell of the present disclosure comprises one or more exogenous antigenic polypeptides, wherein the one or more exogenous antigenic polypeptides is an HPV-E7 antigen. In some embodiments, an engineered erythroid cell or enucleated cell of the present disclosure comprises one or more exogenous antigenic polypeptides, wherein the one or more exogenous antigenic polypeptides is an HPV-E6 antigen. In some embodiments, an engineered erythroid cell or enucleated cell of the present disclosure comprises two or more exogenous antigenic polypeptides, wherein the two or more exogenous antigenic polypeptides comprise an HPV-E6 antigen and an HPV-E7 antigen.

[0232] In certain embodiments, the exogenous antigenic polypeptides are presented on a wild-type or loadable exogenous antigen-presenting polypeptide, e.g., the exogenous antigenic polypeptide is bound to the wild-type or loadable exogenous antigen-presenting polypeptide.

[0233] In some embodiments, the exogenous antigenic polypeptide is 8 amino acids in length to 24 amino acids in length, for example 8, 9, 10, 11, 12, 13, 14, 15, 16, 17, 18, 19, 20, 21, 22, 23, or 24 amino acids in length. In further embodiments, a cleavable site is introduced into the exogenous antigenic polypeptide.

[0234] In some embodiments, the exogenous antigenic polypeptide is covalently attached to the wild-type or loadable exogenous antigen-presenting polypeptide. In some embodiments, the exogenous antigenic polypeptide is non-covalently attached to the wild-type or loadable exogenous antigen-presenting polypeptide. Further details of covalent attachments are described in the methods below.

[0235] In some embodiments, an engineered erythroid cell (e.g., engineered enucleated erythroid cell) or enucleated cell (e.g., modified enucleated cell) provide herein comprises two types of exogenous polypeptides: at least one (one, two, three, or more) wild-type or loadable exogenous antigen-presenting polypeptides, and at least one (one, two, three, or more) exogenous antigenic polypeptide (e.g. a first and/or a second exogenous antigenic polypeptide). In some embodiments, a portion of the exogenous antigenic polypeptide is capable of binding to the antigen-binding cleft of the wild-type or loadable exogenous antigen-presenting polypeptide. In some embodiments, the at least one exogenous antigenic polypeptide(s) comprises a transmembrane domain such as a Type I membrane protein transmembrane domain (e.g., a GPA transmembrane domain), or a Type II membrane protein transmembrane domain (e.g., a small integral membrane protein 1 (SMIM1) transmembrane domain), as either an N-terminal or C-terminal fusion, e.g., such that the portion of the antigenic polypeptide that is capable of binding to a wild-type or loadable exogenous antigen-presenting polypeptide described herein is present on the outer side of the surface of the engineered erythroid cell or enucleated cell. In some embodiments, the exogenous antigenic polypeptide comprises a transmembrane domain, a linker, and an amino acid sequence (e.g., an antigen) that is capable of binding to the antigen-binding cleft of a wild-type or loadable exogenous antigen-presenting polypeptide. In some embodiments, the linker is a GlySer linker. In some embodiments, the linker is from about 30 to about 100 amino acid residues in length. In other embodiments, the linker is between about 40 amino acid residues in length and 70 amino acids in length. In some embodiments, the linker is a cleavable linker (e.g., comprising an enzymatic cleavage site described herein). In some embodiments, the exogenous antigenic polypeptide may be covalently-linked to an exogenous antigen-presenting polypeptide as described herein.

[0236] In some embodiments, the loadable exogenous antigen-presenting polypeptide has a higher affinity for the exogenous antigenic polypeptide than for an exogenous displaceable polypeptide. In some embodiments, the exogenous antigenic polypeptide binds to the loadable exogenous antigen-presenting polypeptide with a K_{D} of from about 1 picomolar to about 100 nanomolar, from about 5 picomolar to about 100 nanomolar, from about 10 picomolar to about 100 nanomolar, from about 20 picomolar to about 100 nanomolar, from about 30 picomolar to about 100 nanomolar, from about 50 picomolar to about 100 nanomolar, from about 100 picomolar to about 100 nanomolar, from about 200 picomolar to about 100 nanomolar, from about 300 picomolar to about 100 nanomolar, from about 400 picomolar to about 100 nanomolar, from about 500 picomolar to about 100 nanomolar, from about 600 picomolar to about 100 nanomolar, from about 700 picomolar to about 100 nanomolar, from about 800 picomolar to about 100 nanomolar, from about 900 picomolar to about 100 nanomolar, from about 1 nanomolar to about 100 nanomolar, from about 2 nanomolar to about 100 nanomolar, from about 5 nanomolar to about 100 nanomolar, from about 10 nanomolar to about 100 nanomolar, from about 20 nanomolar to about 100 nanomolar, from about 30 nanomolar to about 100 nanomolar, from about 40 nanomolar to about 100 nanomolar, from about 50 nanomolar to about 100 nanomolar, from about 60 nanomolar to about 100 nanomolar, from about 70 nanomolar to about 100 nanomolar, from about 80 nanomolar to about 100 nanomolar, or from about 90 nanomolar to about 100 nanomolar.

[0237] Methods of detecting peptides that specifically bind to particular HLA polypeptide and methods of determining the affinity of the peptide for the HLA polypeptide are described herein.

Methods of Displacing A Displaceable Polypeptide from a Loadable Exogenous Antigen-Presenting Polypeptide

[0238] In some embodiments, the present disclosure provides an engineered erythroid cell (e.g., engineered enucleated erythroid cell) or enucleated cell (e.g., modified enucleated cell) comprising a loadable exogenous antigen-presenting polypeptide comprising a displaceable exogenous polypeptide. In some embodiments, the displaceable exogenous polypeptide is displaced from the wild-type or loadable exogenous antigen-presenting polypeptide, e.g., from the antigen-binding cleft of a HLA class I or class II polypeptide present in the exogenous antigen-presenting polypeptide, and a selected exogenous antigenic polypeptide can be bound to the wild-type or loadable exogenous antigen-presenting polypeptide.

[0239] In some embodiments, displacing the displaceable exogenous polypeptide from the wild-type or loadable exogenous antigen-presenting polypeptide and specifically-binding an exogenous antigenic polypeptide to the wild-type or loadable exogenous antigen-presenting polypeptide comprises contacting the engineered erythroid cell or enucleated cell in vitro with the exogenous antigenic polypeptide, wherein the wild-type or loadable exogenous antigen-presenting polypeptide has a higher affinity for the exogenous antigenic polypeptide than for an exogenous displaceable polypeptide. In some embodiments, the exogenous displaceable polypeptide binds to the wild-type or loadable exogenous antigen-presenting polypeptide with a K_{D} of from about 1 nM to about 100 μM. In some embodiments, the exogenous antigenic polypeptide binds to the wild-type or loadable exogenous antigen-presenting polypeptide with a K_{D} of from about 1 picomolar to about 100 nanomolar.

[0240] Multiple displaceable exogenous polypeptides are described above. In some embodiments, the displaceable exogenous polypeptide comprises an amino acid sequence provided in Table 6. In some embodiments, the displaceable exogenous polypeptide comprises or consists of the amino acid sequence ILKEPVHGV (SEQ ID NO: 138). In some embodiments, the displaceable exogenous polypeptide is IAKEPVHGV (SEQ ID NO: 139). In some embodiments, the displaceable exogenous polypeptide comprises or consists of the amino acid sequence ILKEPVHGA (SEQ ID NO: 140). In some embodiments, the displaceable exogenous polypeptide comprises or consists of the amino acid sequence IAKEPVHGA (SEQ ID NO: 141). In some embodiments, the displaceable exogenous polypeptide comprises or consists of the amino acid sequence GLKEPQIQV (SEQ ID NO: 142). In some embodiments, the displaceable exogenous polypeptide comprises or consists of the amino acid sequence NLVPMVATA (SEQ ID NO: 143). In some embodiments, the displaceable exogenous polypeptide comprises or consists of the amino acid sequence IRAAPPPLA (SEQ ID NO: 144).

[0241] In some embodiments, a wild-type or loadable exogenous antigen-presenting polypeptide described herein, or an engineered erythroid cell (e.g., engineered enucleated erythroid cell) or enucleated cell (e.g., modified enucleated cell) comprising the same is contacted with a dipeptide to accelerate the dissociation of a prebound exogenous displaceable polypeptide (see, e.g., Saini et al. (2015) Proc. Nat'l. Acad. Sci. USA 112: 202-7, incorporated in its entirety herein by reference). In some embodiments, a wild-type or loadable exogenous antigen-presenting polypeptide described herein or an engineered erythroid cell or enucleated cell comprising the same is concurrently contacted with a dipeptide and an exogenous antigenic polypeptide. In some embodiments, the engineered erythroid cell (e.g., engineered enucleated erythroid cell) or enucleated cell (e.g., modified enucleated cell) is sequentially contacted with a dipeptide and an exogenous antigenic polypeptide, in any order. In some embodiments, the loadable exogenous antigen-presenting polypeptide comprises an amino acid sequence derived from an HLA class I allele, and the dipeptide is selected from glycyl-leucine (GL), glycyl-methionine (GM), GG, glycyl-alanine (GA), glycyl-valine (GV), glycyl-phenylalanine (GF), leucyl-glycine (LG), glycyl-cyclohexylalanine (G-Cha), glycyl-homoleucine (GHLe), acetylated leucine, and glycyl-arginine (GR), or a combination thereof. In some embodiments, the loadable exogenous antigen-presenting polypeptide comprises an amino acid sequence derived from an allele selected from HLA-A:02:01, HLA-A1:01, HLA-A3:01, HLA-A24:02, HLA-A26:01, HLA-B7:02, HLA-B08:01, HLA-B27:05, HLA-B39:01, HLA-B40:01, HLA-B58:01, HLA-B15:01, and HLA-E01:01, and the dipeptide is selected from glycyl-leucine (GL), glycyl-methionine (GM), GG, glycyl-alanine (GA), glycyl-valine (GV), glycyl-phenylalanine (GF), leucyl-glycine (LG), glycyl-cyclohexylalanine (G-Cha), glycyl-homoleucine (GHLe), acetylated leucine, and glycyl-arginine (GR), or a combination thereof. In some embodiments, the loadable exogenous antigen-presenting polypeptide comprises HLA-B:27:05 and the dipeptide is GR or G-Cha.

[0242] Multiple assays for determining whether a dipeptide specifically binds to a particular ligand (e.g., an exogenous antigen-presenting polypeptide) are known in the art. For example, in some embodiments, a fluorescence anisotropy assay can be used to observe the binding kinetics and determine the peptide association and dissociation rates in a polypeptide-complex (see, e.g., Saini et al. (2015)). The thermal stability of the HLA class I-polypeptide complex can be measured by TDTF experiments as described in Saini et al. (2013) Mol. Immunol 54(3-4):386-96, incorporated in its entirety herein by reference. Furthermore, cell-surface peptide exchange can be determined by flow cytometry (see, e.g., Saini et al. (2015)).

[0243] In some embodiments, displacing the displaceable exogenous polypeptide from the loadable exogenous antigen-presenting polypeptide comprises enzymatically cleaving a linker disposed between the exogenous displaceable polypeptide sequence and the displaceable exogenous polypeptide sequence. Cleavage of the linker facilitates the release and removal of the exogenous displaceable polypeptide from the loadable exogenous antigen-presenting polypeptide. Thus, in some embodiments, the loadable exogenous antigen-presenting polypeptide and the exogenous displaceable polypeptide are connected via a linker, and the linker comprises an enzymatic cleavage site. Suitable enzymatic cleavage sites include, but are not limited to human rhinovirus (HRV) 3C protease cleavage site and tobacco etch virus (TEV) protease cleavage site. In some embodiments, the loadable exogenous antigen-presenting polypeptide or a cell comprising the same may be contacted with an enzyme specific for the enzymatic cleavage site. In some embodiments, the enzymatic cleavage site comprises the amino acid sequence LEVLFQGP (SEQ ID NO: 1). In some embodiments, the enzymatic cleavage site comprises the amino acid sequence ENLYFQG (SEQ ID NO: 2).

[0244] In some embodiments, enzymatic cleavage of the linker exposes a motif that may be used to conjugate a desired exogenous antigenic polypeptide to the linker, thereby facilitating loading (e.g., specific binding) of the exogenous antigenic polypeptide onto the loadable exogenous antigen-presenting polypeptide. Any motif(s) that are recognized by enzymes that catalyze the conjugation of polypeptides may be incorporated into either the linker and/or the desired exogenous antigenic polypeptide as long as they are compatible in order to facilitate the conjugation reaction. For instance, motifs recognized by enzymes such as sortase (e.g., GGG, GG, G and any one of LPTXG (SEQ ID NO: 3), IPKTG (SEQ ID NO: 881), MPXTG (SEQ ID NO: 882), LAETG (SEQ ID NO: 883), LPXAG (SEQ ID NO: 884), LPESG (SEQ ID NO: 885), LPELG (SEQ ID NO: 886), LPEVG (SEQ ID NO: 887) (see, e.g., Antos et al. (2016) Curr. Opin. Struct. Biol. 38:111-8), butelase 1 (e.g., C-terminal NHV and any one of N-terminal X₁X₂ amino acid sequence, wherein X1 is any amino acid and X2 is I, L, V, or C (see, e.g., Nguyen et al. 2016 Nat Protocols 11: 1977-88)), or SpyCatcher (AHIVMVDAYKPTK (SEQ ID NO: 4) or ATHIKFSKRD (SEQ ID NO: 5)) may be used.

[0245] In some embodiments, any sortase known in the art can be used to conjugate an exogenous antigenic polypeptide to an antigen-presenting polypeptide described herein. Sortases have been classified into 4 classes, designated A, B, C, and D, based on sequence alignment and phylogenetic analysis (see, e.g., Dramsi et al. (2005) Res. Microbiol. 156 (3): 289-97). The term “sortase A” is used herein to refer to a class A sortase, usually named SrtA in any particular bacterial species, e.g., SrtA from Staphylococcus aureus or S. pyogenes. Likewise “sortase B” is used herein to refer to a class B sortase, usually named SrtB in any particular bacterial species, e.g., SrtB from S. aureus. The present disclosure encompasses embodiments relating to any of the sortase classes known in the art (e.g., a sortase A from any bacterial species or strain, a sortase B from any bacterial species or strain, a class C sortase from any bacterial species or strain, and a class D sortase from any bacterial species or strain). In some embodiments, a sortase that utilizes a nucleophilic acceptor sequence having an N-terminal glycine, e.g., 1-5 N-terminal glycines, is used, such as SrtA from S. aureus. In some embodiments it is contemplated to use two or more sortases. In some embodiments the sortases may utilize different sortase recognition sequences and/or different nucleophilic acceptor sequences. For example, SrtA from S. pyogenes can utilize a nucleophilic acceptor sequence having one or more N-terminal alanines, e.g., 1-5 N-terminal alanines and/or may utilize a sortase recognition motif comprising LPXTA (SEQ ID NO: 37).

[0246] An exemplary wild type S. aureus SrtA sequence (Gene ID: 1125243, NCBI RefSeq Acc. No. NP_375640.1) is shown below in

SEQ ID NO: 888
MKKWTNRLMTIAGVVLILVAAYLFAKPHIDNYLHDKDKDEKIEQYDKNVK
EQASKDNKQQAKPQIPKDKSKVAGYIEIPDADIKEPVYPGPATPEQLNRG
VSFAEENESLDDQNISIAGHTFIDRPNYQFTNLKAAKKGSMVYFKVGNET
RKYKMTSIRDVKPTDVEVLDEQKGKDKQLTLITCDDYNEKTGVWEKRKIF
VATEVK.

[0247] One of ordinary skill in the art will appreciate that different subspecies, strains, and isolates may differ in sequence at positions that do not significantly affect activity. For example, another exemplary wild type S. aureus SrtA sequence (Gene ID: 3238307, NCBI RefSeq Acc. No. YP_187332.1; GenBank Acc. No. AAD48437) has a K residue at position 57 and a G residue at position 167, as shown below in

SEQ ID NO: 889
MKKWTNRLMTIAGVVLILVAAYLFAKPHIDNYLHDKDKDEKIEQYDKNVK
EQASKDKKQQAKPQIPKDKSKVAGYIEIPDADIKEPVYPGPATPEQLNRG
VSFAEENESLDDQNISIAGHTFIDRPNYQFTNLKAAKKGSMVYFKVGNET
RKYKMTSIRDVKPTDVGVLDEQKGKDKQLTLITCDDYNEKTGVWEKRKIF
VATEVK.

[0248] In some embodiments, a calcium-independent sortase A variant may be used as described herein and comprises at least three amino acid substitutions relative to a wild-type sortase A, wherein the amino acid substitutions comprise a) a K residue at position 105; b) a Q or A residue at position 108; and c) at least one amino acid substitution selected from the group consisting of i) a R residue at position 94; ii) a S residue at position 94; iii) a N residue at position 160; iv) a A residue at position 165; v) a E residue at position 190; and vi) a T residue at position 196. In some embodiments a calcium-independent sortase A variant comprises the following amino acid substitutions relative to a wild-type sortase A: a) a K residue at position 105; b) a Q or A residue at position 108; c) an S residue at position 94 or R residue at position 94; d) an N residue at position 160; e) an A residue at position 165, and a T residue at position 196. In some embodiments, a calcium-independent sortase A variant comprises the following amino acid substitutions relative to a wild-type sortase A: a) a K residue at position 105; b) a Q or A residue at position 108; c) a R or S residue at position 94; d) a N residue at position 160; e) a A residue at position 165; f) a E residue at position 190; and g) a T residue at position 196. In some embodiments, a sortase comprises the following sequence, in which amino acids at positions 94, 105, 108, 160, 165, 190, and 196 relative to a full length S. aureus SrtA sequence are shown in bold:

(SEQ ID NO: 890)
MQAKPQIPKDKSKVAGYIEIPDADIKEPVYPGPATREQLNRGVSFAEENE
SLDDQNISIAGHTFIDRPNYQFTNLKAAKKGSMVYFKVGNETRKYKMTSI
RNVKPTAVEVLDEQKGKDKQLTLITCDDYNEETGVWETRKIFVATEVK.

[0249] In some embodiments, a transamidase that has an altered substrate selectivity as compared with a naturally occurring sortase may be used. For example, variants of S. aureus sortase A that accept aromatic amino acids (e.g., phenylalanine), as well as amino acids with small side chains such as Ala, Asp, Ser, Pro, and Gly, at position 1 of the sortase recognition motif (instead of L) have been identified (Piotukh et al. (2011) J. Am. Chem. Soc. 133(44): 17536-9, the entire content of which is incorporated herein by reference). In some embodiments such a sortase is used in a composition or method of the invention. A sortase with an altered substrate selectivity with regard to the sortase recognition motif may be generated by engineering one or more mutations in the sortase, e.g., in a region of the protein that is involved in recognition and/or binding of the sortase recognition motif, e.g., the putative substrate recognition loop (e.g., the loop connecting strands P6 and P7 (β6/β7 loop) in SrtA (Va1161-Asp176). In some embodiments, a phage-display, yeast display, or other screen of a mutant sortase library randomized in the substrate recognition loop may be performed, and variants with altered substrate specificity may be identified.

[0250] In some embodiments the sortase is a sortase B (SrtB), e.g., a sortase B of S. aureus, Bacillus anthracis, or Listeria monocytogenes. Motifs recognized by sortases of the B class (SrtB) often fall within the consensus sequences NPXTX, e.g., NP[Q/K]-[T/sHN/G/s], such as NPQTN (SEQ ID NO: 891) or NPKTG (SEQ ID NO: 892), and can be adapted for use as described herein. For example, sortase B of S. aureus or B. anthracis cleaves the NPQTN (SEQ ID NO: 891) or NPKTG motif (SEQ ID NO: 892) of IsdC in the respective bacteria (see, e.g., Marraffini and Schneewind (2007) J. Bact. 189(17): 6425-36). Other recognition motifs found in putative substrates of class B sortases are NSKTA (SEQ ID NO: 893), NPQTG (SEQ ID NO: 894), NAKTN (SEQ ID NO: 895), and NPQSS (SEQ ID NO: 896). For example, SrtB from L. monocytogenes recognizes certain motifs lacking P at position 2 and/or lacking Q or K at position 3, such as NAKTN (SEQ ID NO: 895) and NPQSS (SEQ ID NO: 896).

[0251] In some embodiments, the sortase is a class C sortase. Class C sortases may utilize LPXTG (SEQ ID NO: 36) as a recognition motif.

[0252] In some embodiments, the sortase is a class D sortase. Sortases in this class are predicted to recognize motifs with a consensus sequence NA-[E/A/S/H]-TG (SEQ ID NO: 897). Class D sortases have been found, e.g., in Streptomyces spp., Corynebacterium spp., Tropheryma whipplei, Thermobifida fusca, and Bifidobacterium longhum. LPXTA (SEQ ID NO: 37) or LAXTG (SEQ ID NO: 898) may serve as a recognition sequence for class D sortases

[0253] Motifs recognizable by a sortase are well known in the art, and any such known motifs may be utilized. One exemplary motif recognizable by a sortase, particularly sortase A, is LPXTG (SEQ ID NO: 36), in which X can be any amino acid residue (naturally-occurring or non-naturally occurring), e.g., any of the 20 standard amino acids found most commonly in proteins found in living organisms. In some embodiments, the recognition motif is LPXTG (SEQ ID NO: 36) or LPXT, in which X is D, E, A, N, Q, K, or R. In some embodiments, X is selected from K, E, N, Q, A in an LPXTG (SEQ ID NO: 36) or LPXT motif, which are recognizable by a sortase A. In some embodiments, X is selected from K, S, E, L, A, N in an LPXTG (SEQ ID NO: 36) or LPXT motif, which are recognizable by a class C sortase. Exemplary sortase recognition motifs include, but are not limited to, LPKTG (SEQ ID NO: 899), LPITG (SEQ ID NO: 900), LPDTA (SEQ ID NO: 901), SPKTG (SEQ ID NO: 902), LAETG (SEQ ID NO: 883), LAATG (SEQ ID NO: 903), LAHTG (SEQ ID NO: 904), LASTG (SEQ ID NO: 905), LPLTG (SEQ ID NO: 906), LSRTG (SEQ ID NO: 907), LPETG (SEQ ID NO: 908), VPDTG (SEQ ID NO: 909), IPQTG (SEQ ID NO: 910), YPRRG (SEQ ID NO: 911), LPMTG (SEQ ID NO: 912), LAFTG (SEQ ID NO: 913), LPQTS (SEQ ID NO: 914), LPXT, LAXT, LPXA, LGXT, IPXT, NPXT, NPQS (SEQ ID NO: 915), LPST (SEQ ID NO: 916), NSKT (SEQ ID NO: 917), NPQT (SEQ ID NO: 918), NAKT (SEQ ID NO: 919), LPIT (SEQ ID NO: 920), LAET (SEQ ID NO: 921), LPXTX, LPKTG (SEQ ID NO: 899), LPATG (SEQ ID NO: 923), LPNTG (SEQ ID NO: 924), or LPETG (SEQ ID NO: 908); wherein each occurrence of X represents independently any amino acid residue. In some embodiments the motif comprises an ‘A’ rather than a ‘T’ at position 4, e.g., LPXAG (SEQ ID NO: 884), e.g., LPNAG (SEQ ID NO: 925), wherein each occurrence of X represents independently any amino acid residue). In some embodiments the motif comprises an ‘A’ rather than a G′ at position 5, e.g., LPXTA (SEQ ID NO: 37), e.g., LPNTA (SEQ ID NO: 926), wherein each occurrence of X represents independently any amino acid residue). In some embodiments the motif comprises a G′ rather than ‘P’ at position 2, e.g., LGXTG (SEQ ID NO: 927), e.g., LGATG (SEQ ID NO: 928), wherein each occurrence of X represents independently any amino acid residue). In some embodiments the motif comprises an ‘I’ rather than 1′ at position 1, e.g., IPXTG (SEQ ID NO: 929), e.g., IPNTG (SEQ ID NO: 930) or IPETG (SEQ ID NO: 931), wherein each occurrence of X represents independently any amino acid residue). The motifs may be present immediately adjacent to the enzymatic cleavage site or within a range of amino acids such that they are recognized by the conjugating enzyme.

[0254] In some embodiments, the enzymatic cleavage site is within 10 amino acids or less from a GGG motif in the linker, and is located between the GGG motif and the exogenous displaceable polypeptide. In some embodiments, the GGG motif is C terminal to the enzymatic cleavage site.

[0255] In some embodiments, the enzymatic cleavage site is within 10 amino acids or less from an LPTXG motif (SEQ ID NO: 3), and is located between the LPTXG motif (SEQ ID NO: 3) and the exogenous displaceable polypeptide. In some embodiments, the LPTXG motif (SEQ ID NO: 3) is C terminal to the enzymatic cleavage site.

[0256] In some embodiments, the enzymatic cleavage site is within 10 amino acids or less from an NHV motif, and is located between the NHV motif and the exogenous displaceable polypeptide. In some embodiments, the NHV motif is C terminal to the enzymatic cleavage site. In some embodiments, the enzymatic cleavage site is adjacent to a SpyTag sequence (AHIVMVDAYKPTK (SEQ ID NO: 4)), and is located between the SpyTag sequence and the exogenous displaceable polypeptide. In some embodiments, the SpyTag sequence is C terminal to the enzymatic cleavage site. In some embodiments, the enzymatic cleavage site is within 10 amino acids or less from the amino acid sequence AHIVMVDAYKPTK (SEQ ID NO: 4).

[0257] In some embodiments, the enzymatic cleavage site is adjacent to a KTag sequence (ATHIKFSKRD (SEQ ID NO: 5)), and is located between the KTag sequence and the exogenous displaceable polypeptide. In some embodiments, the KTag sequence is C terminal to the enzymatic cleavage site. In some embodiments, the enzymatic cleavage site is within 10 amino acids or less from the amino acid sequence ATHIKFSKRD (SEQ ID NO: 5).

### Methods of Conjugating an Exogenous Antigenic Polypeptide to a Wild-Type or Loadable Exogenous Antigen-Presenting Polypeptide

[0258] In some embodiments, the present disclosure provides an engineered erythroid cell (e.g., engineered enucleated erythroid cell) or enucleated cell (e.g., modified enucleated cell) comprising a wild-type or loadable exogenous antigen-presenting polypeptide on the cell surface, wherein the loadable exogenous antigen-presenting polypeptide comprises one or more amino acid substitutions which stabilize the loadable exogenous antigen-presenting polypeptide on the cell surface. In some embodiments, the loadable exogenous antigen-presenting polypeptide is stabilized on the cell surface in the absence of a polypeptide bound to the exogenous antigen-presenting polypeptide. In some embodiments, an exogenous antigenic polypeptide is bound to the wild-type or loadable exogenous antigen-presenting polypeptide. In other embodiments, the loadable exogenous antigen-presenting polypeptide comprises a displaceable exogenous polypeptide which is displaced from the loadable exogenous antigen-presenting polypeptide, and a selected exogenous antigenic polypeptide is bound to the loadable exogenous antigen-presenting polypeptide.

[0259] In some embodiments, specifically binding an exogenous antigenic polypeptide to the wild-type or loadable exogenous antigen-presenting polypeptide comprises conjugating the exogenous antigenic polypeptide to the wild-type or loadable exogenous antigen-presenting polypeptide. For example, in some embodiments, the exogenous antigenic polypeptide can be conjugated to the wild-type or loadable exogenous antigen-presenting polypeptide using click chemistry, as described in detail herein.

[0260] In some embodiments, coupling reagents can be used to couple an exogenous antigenic polypeptide to a wild-type or loadable exogenous antigen-presenting polypeptide. Click chemistry and other conjugation methods for functionalizing erythroid cells is described in International Patent Publication No. WO 2018/151829, the entire contents of which are incorporated herein by reference.

[0261] In some embodiments, an engineered erythroid cell (e.g., engineered enucleated erythroid cell) or enucleated cell (e.g., modified enucleated cell) described herein comprises many as, at least, more than, or about 5,000, 10,000, 50,000, 100,000, 200,000, 300,000, 400,000, 500,000 coupling reagents per cell. In some embodiments, the engineered erythroid cells (e.g., engineered enucleated erythroid cells) or enucleated cells (e.g., modified enucleated cells) are made by a method comprising a) coupling a first coupling reagent to a wild-type or loadable exogenous antigen-presenting polypeptide, thereby making a pharmaceutical preparation, product, or intermediate. In an embodiment, the method further comprises: b) contacting the wild-type or loadable exogenous antigen-presenting polypeptide with an exogenous antigenic polypeptide coupled to a second coupling reagent e.g., under conditions suitable for reaction of the first coupling reagent with the second coupling reagent. In some embodiments, two or more exogenous antigenic polypeptides are coupled to the wild-type or loadable exogenous antigen-presenting polypeptide (e.g., using click chemistry).

[0262] In some embodiments, the coupling reagent comprises an azide coupling reagent. In some embodiments, the azide coupling reagent comprises an azidoalkyl moiety, azidoaryl moiety, or an azidoheteroaryl moiety. Exemplary azide coupling reagents include 3-azidopropionic acid sulfo-NHS ester, azidoacetic acid NHS ester, azido-PEG-NHS ester, azidopropylamine, azido-PEG-amine, azido-PEG-maleimide, bis-sulfone-PEG-azide, or a derivative thereof. Coupling reagents may also comprise an alkene moiety, e.g., a transcycloalkene moiety, an oxanorbornadiene moiety, or a tetrazine moiety. Additional coupling reagents can be found in Click Chemistry Tools (available on the world wide web at clickchemistrytools.com) or Lahann, J. (ed.) (2009) Click Chemistry for Biotechnology and Materials Science, each of which is incorporated herein by reference in its entirety.

[0263] In some embodiments, the exogenous antigenic polypeptide is attached to the wild-type or loadable exogenous antigen-presenting polypeptide, via a covalent attachment to generate an engineered erythroid cell or enucleated cell comprising an engineered erythroid cell or enucleated cell presenting one or more exogenous antigenic polypeptides (e.g. a first exogenous antigenic polypeptide, or a first antigenic polypeptide and a second exogenous antigenic polypeptide). For example, the exogenous antigenic polypeptide may be derivatized and bound to the wild-type or loadable exogenous antigen-presenting polypeptide using a coupling compound containing an electrophilic group that will react with nucleophiles on the engineered erythroid cell or enucleated cell (e.g., nucleophiles present on the wild-type or loadable exogenous antigen-presenting polypeptide on the cell) to form the interbonded relationship. Representative of these electrophilic groups are αβ unsaturated carbonyls, alkyl halides and thiol reagents such as substituted maleimides. In addition, the coupling compound can be coupled to an antigenic polypeptide via one or more of the functional groups in the polypeptide such as amino, carboxyl and tryosine groups. For this purpose, coupling compounds should contain free carboxyl groups, free amino groups, aromatic amino groups, and other groups capable of reaction with enzyme functional groups. Highly charged antigenic polypeptides can also be prepared for immobilization on, e.g., an exogenous wild-type or loadable antigen-presenting polypeptide, through electrostatic bonding to generate a modified enucleated cell. Examples of these derivatives would include polylysyl and polyglutamyl enzymes.

[0264] The choice of the reactive group embodied in the derivative depends on the reactive conditions employed to couple the electrophile with the nucleophilic groups on the exogenous wild-type or loadable antigen-presenting polypeptide for immobilization. A controlling factor is the desire not to inactivate the coupling reagent prior to coupling of the exogenous antigenic polypeptide immobilized by the attachment to the exogenous wild-type or loadable antigen-presenting polypeptide. Such coupling immobilization reactions can proceed in a number of ways. Typically, a coupling reagent can be used to form a bridge between the exogenous antigenic polypeptide and the wild-type or loadable exogenous antigen-presenting polypeptide. In this case, the coupling reagent should possess a functional group such as a carboxyl group which can be caused to react with the exogenous antigenic polypeptide. One way of preparing the exogenous antigenic polypeptide for conjugation includes the utilization of carboxyl groups in the coupling reagent to form mixed anhydrides which react with the exogenous antigenic polypeptide, in which use is made of an activator which is capable of forming the mixed anhydride. Representative of such activators are isobutylchloroformate or other chloroformates which give a mixed anhydride with coupling reagents such as 5,5′-(dithiobis(2-nitrobenzoic acid) (DTNB), p-chloromercuribenzoate (CMB), or m-maleimidobenzoic acid (MBA). The mixed anhydride of the coupling reagent reacts with the exogenous antigenic polypeptide to yield the reactive derivative which in turn can react with nucleophilic groups on the engineered erythroid cell or enucleated cell (e.g., on an exogenous wild-type or loadable antigen-presenting polypeptide present on the cell surface) to immobilize the exogenous antigenic polypeptide.

[0265] Functional groups on an antigenic polypeptide, such as carboxyl groups can be activated with carbodiimides and the like activators. Subsequently, functional groups on the bridging reagent, such as amino groups, will react with the activated group on the exogenous antigenic polypeptide to form the reactive derivative. In addition, the coupling reagent should possess a second reactive group which will react with appropriate nucleophilic groups on the wild-type or loadable antigen-presenting polypeptide to form the bridge. Typical of such reactive groups are alkylating agents such as iodoacetic acid, αβ unsaturated carbonyl compounds, such as acrylic acid and the like, thiol reagents, such as mercurials, substituted maleimides and the like.

[0266] Alternatively, functional groups on the exogenous antigenic polypeptide can be activated so as to react directly with nucleophiles on, e.g., on a wild-type or loadable exogenous antigen-presenting polypeptide, to obviate the need for a bridge-forming compound. For this purpose, use is made of an activator such as Woodward's Reagent K or the like reagent which brings about the formation of carboxyl groups in the exogenous antigenic polypeptide into enol esters, as distinguished from mixed anhydrides. The enol ester derivatives of exogenous antigenic polypeptides subsequently react with nucleophilic groups on, e.g., a wild-type or loadable exogenous antigen-presenting polypeptide to effect immobilization of the exogenous antigenic polypeptide, thereby conjugating the exogenous antigenic polypeptide onto the wild-type or loadable antigen-presenting polypeptide.

[0267] In some embodiments, the exogenous antigenic polypeptide can be derivatized or activated as described above to yield an exogenous antigenic polypeptide bearing one or more reactive functional groups that can react with one or more amino acid residues located on the wild-type or loadable exogenous antigen-presenting polypeptide of the engineered erythroid cells (e.g., engineered enucleated erythroid cells) or enucleated cells (e.g., modified enucleated cells).

[0268] In some embodiments, the exogenous antigenic polypeptide comprises one or more (e.g., two, three, four, five, etc.) thiol-reactive groups that can react with one or more cysteine thiol groups located on the wild-type or loadable exogenous antigen-presenting polypeptide of the engineered erythroid cells (e.g., engineered enucleated erythroid cells) or enucleated cells (e.g., modified enucleated cells).

[0269] As used herein, a thiol-reactive functional group is a functional group that can readily react with the thiol group (e.g., a thiol group of a cysteine residue) to form a covalent bond. Any suitable thiol-reactive functional groups can be used.

[0270] In some embodiments, the thiol-reactive groups include, but are not limited to, (i) 2-cyanobenzothiazole (CBT) (see Ren et al. (2009) Agnew. Chem. Int. Ed. 48: 9658-62; Chen et al. (2018) ChemistryOpen 7: 256-61; Zhang and Liang (2018) Sci. China Chem. 61: 1-11); (ii) maleimide or maleimide derivatives (Ravasco et al. (2019) Chem. Eur. 1 25: 43-59) (e.g., N-aryl maleimide, beta amino maleimide, acetal containing maleimides, exocyclic maleimides, dialkylmaleimide, halogenated maleimide (e.g., bromomaleimide, dibromomaleimide, diiodomaleimide (Behrens et al. (2015) Mol. Pharm. 12(11): 3986-98)) or aryldithiomaleimide (e.g., dithiophenylmaleimide (Nunes et al. (2015) Chem. Commun. (Camb). 51(53): 10624-7))); (iii) arylpropionitriles (e.g., 3-arylpropiolonitrile (Koniev et al. (2014) Bioconjug. Chem. 25(2): 202-6) or 3,3′-arylene-dipropiolonitrile (Koniev et al. (2018) Medchemcomm. 9(5):827-30); (iv) sulfones (e.g., phenyloxadiazolyl sulfone (Patterson et al. (2014) Bioconjugate Chem. 25, 1402-7), benzothiazolyl sulfone (Toda et al. (2013) Agnew Chem. Int. Ed. Engl. 52(48): 12592-6), or bis-sulfone (Badescu et al. (2014) Bioconjug. Chem. 25(6): 1124-36); (v) allenamide (e.g., benzylallenamide, cyclohexylallenamide, naphthylallenamide, aminoethylallenamide, etc. (Abbas et al. (2014) Angew Chem. Int. Ed. Engl. 53(29): 7491-4)); (vi) dibromopyridazinedione (e.g., 4,5-dibromo-1,2-dihydro-pyridazine-3,6-dione (Bahou et al. (2018) Org. Biomol. Chem. 16(8): 1359-66)), (vii) disulfides (e.g., nitropyridyl disulfide (Sadowsky et al. (2017) Bioconjug. Chem. 28(8): 2086-98)), and (viii) haloacetamide (e.g., iodoacetamide, bromoacetamide or chloroacetamide (Free et al. (2006) Org. Biomol. Chem. 4(9): 1817-30)).

[0271] Table A lists exemplary exogenous antigenic polypeptides having a thiol-reactive funtional group and the resulting modified engineered erythroid cell or enucleated cell. P₁ represents the exogenous antigenic polypeptide; L is absent or represents a spacer connecting the reactive functional group and the peptide; P₂ represents the wild-type or loadable exogenous antigen-presenting polypeptide located on the surface of the engineered erythroid cells (e.g., engineered enucleated erythroid cells) or enucleated cells (e.g., modified enucleated cells). Cys-SH represents the N- or C-terminal cysteine of the wild-type or loadable exogenous antigen-presenting polypeptide.

[0272] In some embodiments, the cysteine of the wild-type or loadable exogenous antigen-presenting polypeptide located on the surface of the engineered erythroid cells (e.g., engineered enucleated erythroid cells) or enucleated cells (e.g., modified enucleated cells) is an N-terminal cysteine of the wild-type or loadable exogenous antigen-presenting polypeptide, e.g., wherein the wild-type or loadable exogenous antigen-presenting polypeptide comprises a Type I membrane protein transmembrane domain (e.g., GPA). In some embodiments, the N-terminal cysteine is located in a linker, e.g., a linker disposed adjacent to, e.g., N-terminal to, the β2M polypeptide. In some embodiments, the cysteine of the wild-type or loadable exogenous antigen-presenting polypeptide is a C-terminal cysteine of the wild-type or loadable exogenous antigen-presenting polypeptide, e.g., wherein the wild-type or loadable exogenous antigen-presenting polypeptide comprises a Type II membrane protein transmembrane domain (e.g., SMIM1). In some embodiments, the C-terminal cysteine is located in a linker, e.g., a linker disposed adjacent to, e.g., C-terminal to, the β2M polypeptide. For example, the linker may be any one of the linkers presented in Table 3, where the N-terminal or C-terminal amino acid residue is replaced with a cysteine.

[0273] In some embodiments, where the wild-type or loadable exogenous antigen-presenting polypeptide comprises an exogenous displaceable polypeptide, an enzymatic cleavage site may be disposed in the linker connecting the HLA polypeptide and the exogenous displaceable polypeptide, wherein the enzymatic cleavage of the linker exposes an N-terminal or C-terminal cysteine that may be used to conjugate a desired exogenous antigenic polypeptide to the linker, thereby facilitating loading (e.g., specific binding) of the exogenous antigenic polypeptide onto the wild-type or loadable exogenous antigen-presenting polypeptide.

TABLE A

| Reactive Group | |
|---|---|
| Cyanobenzothiazole (CBT) | [chemical structure] |
| Maleimide or maleimide derivative | [chemical structure] |
| | [chemical structure] |
| | [chemical structure] |
| Arylpropionitrile | [chemical structure] |
| Sulfone | [chemical structure] |
| | [chemical structure] |
| Allenamide | [chemical structure] |
| Dibromopyridazinedione | [chemical structure] |
| Disulfide | [chemical structure] |
| Haloacetamide | [chemical structure] |
| | X = Br, Cl or I |

[0274] In some embodiments, the exogenous antigenic polypeptide having one or more (e.g., two, three, four, five, etc.) thiol-reactive groups is covalently linked to a N-terminal cysteine and/or a C-terminal cysteine of the wild-type or loadable exogenous antigen-presenting polypeptide. In some embodiments, the exogenous antigenic polypeptide derivative having one or more cyanobenzothiazole groups is covalently linked to a N-terminal cysteine of the wild-type or loadable exogenous antigen-presenting polypeptide. In some embodiments, the exogenous antigenic polypeptide having one or more maleimide or maleimide derivative groups is covalently linked to a N-terminal cysteine and/or a C-terminal cysteine of the wild-type or loadable exogenous antigen-presenting polypeptide. In some embodiments, the maleimide or maleimide derivative is a N-aryl maleimide. In some embodiments, the maleimide or maleimide derivative is a beta amino maleimide. In some embodiments, the maleimide or maleimide derivative is an acetal containing maleimide. In some embodiments, the maleimide or maleimide derivative is an exocyclic maleimide. In some embodiments, the maleimide or maleimide derivative is a dialkylmaleimide. In some embodiments, the maleimide or maleimide derivative is a halogenated maleimide e.g., bromomaleimide, dibromomaleimide, or diiodomaleimide. In some embodiments, the maleimide or maleimide derivative is an aryldithiomaleimide, e.g., dithiophenylmaleimide. In some embodiments, the exogenous antigenic polypeptide having one or more arylpropionitrile groups is covalently linked to a N-terminal cysteine and/or a C-terminal cysteine of the wild-type or loadable exogenous antigen-presenting polypeptide. In some embodiments, the arylpropionitrile is a 3-arylpropiolonitrile. In some embodiments, the arylpropionitrile is a 3,3′-arylene-dipropiolonitrile. In some embodiments, the exogenous antigenic polypeptide having one or more sulfone groups is covalently linked to a N-terminal cysteine and/or a C-terminal cysteine of the wild-type or loadable exogenous antigen-presenting polypeptide. In some embodiments, the sulfone is a phenyloxadiazolyl sulfone. In some embodiments, the sulfone is a benzothiazolyl sulfone. In some embodiments, the sulfone is a bis-sulfone. In some embodiments, the exogenous antigenic polypeptide having one or more allenamide groups is covalently linked to a N-terminal cysteine and/or a C-terminal cysteine of the wild-type or loadable exogenous antigen-presenting polypeptide. In some embodiments, the allenamide is a benzylallenamide. In some embodiments, the allenamide is a cyclohexylallenamide. In some embodiments, the allenamide is a naphthylallenamide. In some embodiments, the allenamide is a aminoethylallenamide. In some embodiments, the exogenous antigenic polypeptide having one or more dibromopyridazinedione groups is covalently linked to a N-terminal cysteine and/or a C-terminal cysteine of the wild-type or loadable exogenous antigen-presenting polypeptide. In some embodiments, the dibromopyridazinedione is a 4,5-dibromo-1,2-dihydro-pyridazine-3,6-dione. In some embodiments, the exogenous antigenic polypeptide having one or more disulfide groups is covalently linked to a N-terminal cysteine and/or a C-terminal cysteine of the wild-type or loadable exogenous antigen-presenting polypeptide. In some embodiments, the disulfide is a nitropyridyl disulfide. In some embodiments, the exogenous antigenic polypeptide having one or more haloacetamide groups is covalently linked to a N-terminal cysteine and/or a C-terminal cysteine of the wild-type or loadable exogenous antigen-presenting polypeptide. In some embodiments, the haloacetamide is a iodoacetamide. In some embodiments, the haloacetamide is a bromoacetamide. In some embodiments, the haloacetamide is a chloroacetamide.

[0275] In some embodiments, the exogenous antigenic polypeptide comprises one or more (e.g., two, three, four, etc.) diazirine groups (Yang et al. (2015) Chem. Sci. 6: 1011-7; Yang et al. (2016) Nat. Chem. Biol. 12(2): 70-2), which can react with one or more amino acid residues located in the wild-type or loadable exogenous antigen-presenting polypeptide of the engineered erythroid cells (e.g., engineered enucleated erythroid cells) or enucleated cells (e.g., modified enucleated cells). In some embodiments, the one or more amino acid residues are located in the antigen-binding cleft of the wild-type or loadable exogenous antigen-presenting polypeptide. In some embodiments, the modified exogenous antigenic polypeptide bearing one or more diazarine groups is reacted with the wild-type or loadable exogenous antigen-presenting polypeptide under UV irradiation to covalently link the exogenous antigenic polypeptide to the wild-type or loadable exogenous antigen-presenting polypeptide.

[0276] In some embodiments, the exogenous antigenic polypeptide bearing a reactive functional group (e.g., a thiol-reactive group or a diazarine group) described above further comprises a spacer between the polypeptide and the reactive groups (e.g., thiol-reactive groups or diazirine groups). Any suitable spacer that covalently links the exogenous antigenic polypeptide and reactive functional group can be used. Exemplary spacers include, but are not limited to, PEG spacers, diamines (e.g., ethylene diamine), an amino acid, and peptide (e.g., a peptide having 1 to 40 amino acid residues).

[0277] In some embodiments, the engineered erythroid cell (e.g., engineered enucleated erythroid cell) or enucleated cell (e.g., modified enucleated cell) presents one or more exogenous antigenic polypeptides, wherein the one or more exogenous antigenic polypeptides are enzymatically conjugated to the wild-type or loadable exogenous antigen-presenting polypeptide.

[0278] In specific embodiments, the exogenous antigenic polypeptide can be conjugated to the wild-type or loadable exogenous antigen-presenting polypeptide by various chemical and enzymatic means, including but not limited to, chemical conjugation with bifunctional cross-linking agents such as, e.g., an NHS ester-maleimide heterobifunctional crosslinker to connect a primary amine group with a reduced thiol group.

[0279] Exogenous antigenic polypeptides may also be conjugated to a wild-type or loadable exogenous antigen presenting polypeptide on an engineered erythroid cell or enucleated cell provided herein using a sortase described herein (e.g., a sortase A). For example, a first exogenous polypeptide (e.g., a wild-type or loadable exogenous antigen presenting polypeptide or an exogenous antigenic polypeptide(s)) comprises or is engineered to include either an acceptor sequence (e.g., LPXTG (SEQ ID NO: 36) or LPXTA (SEQ ID NO: 37)), and the second exogenous polypeptide (e.g., a wild-type or loadable exogenous antigen presenting polypeptide or an exogenous antigenic polypeptide(s)) comprises or is engineered to include an N-terminal donor sequence (e.g., G, GG, GGG, A, AA, and AAA).

[0280] When contacted with a suitable sortase (e.g., a Streptococcus aureus sortase A or a S. pyogenes sortase A) a transpeptidation reaction ocurrs such that both the wild-type or loadable exogenous antigen presenting polypeptide and the exogenous antigenic polypeptide(s) are conjugated (see, e.g., Swee et al. (2013) Proc. Nat'l. Acad. Sci. USA 110(4): 1428-33, incorporated herein by reference). In some embodiments, the N-terminus of the exogenous wild-type or loadable exogenous antigen presenting polypeptide comprises an N-terminal donor sequence G, GG, GGG, A, AA, or AAA. In some embodiments, N-terminal donor sequence (e.g., GG, GGG) of the wild-type or loadable exogenous antigen presenting polypeptide is conjugated to an exogenous antigenic polypeptide containing the acceptor sequence LPXTG (SEQ ID NO: 36) or LPXTA (SEQ ID NO: 37), via a sortase-mediated reaction (e.g., a sortase A-mediated reaction). Additional acceptor sequences and donor sequences that can be used for sortase-mediated conjugation reactions and methods of utilizing sortagging are described in Antos et al. (2016) Curr Opin Struct Biol. 38: 111-8, the contents of which are hereby incorporated herein by reference.

[0281] Exogenous antigenic polypeptide(s) can be conjugated to a wild-type or loadable exogenous antigen presenting polypeptide on an engineered erythroid cell (e.g., engineered enucleated erythroid cell) or enucleated cell (e.g., modified enucleated cell) using a butelase 1, e.g., Clitoria ternatea butelase 1 (UniProtKB Accession No. A0A060D9Z7), as described e.g., in Nguyen et al. (2016). For example, a first exogenous polypeptide (e.g., the wild-type or loadable exogenous antigen presenting polypeptide or the exogenous antigenic polypeptide(s)) comprises or is engineered to include a C-terminal butelase-1 tripeptide recognition sequence Asx-His-Val (wherein Asx is Asp or Asn). The second exogenous polypeptide (e.g., the wild-type or loadable exogenous antigen presenting polypeptide or the exogenous antigenic polypeptide(s)) is engineered to include an N-terminal X₁X₂, wherein X1 is any amino acid and X₂ is I, L, V, or C. When contacted with butelase 1, both exogenous polypeptides (e.g., the wild-type or loadable exogenous antigen presenting polypeptide and the exogenous antigenic polypeptide(s)) are conjugated by the enzyme (see, e.g., Nguyen et al. (2016)).

[0282] Alternatively, exogenous polypeptides can be conjugated onto the engineered erythroid cells (e.g., engineered enucleated erythroid cells) or enucleated cells (e.g., modified enucleated cells) described herein, or exogenous polypeptides can be conjugated to one another, using a catalytic bond-forming polypeptide (e.g., a SpyTag/SpyCatcher system). For example, the engineered erythroid cells or enucleated cells provided herein can be engineered to include an exogenous polypeptide comprising either a SpyTag or a SpyCatcher polypeptide (e.g., on the extracellular portion of the exogenous polypeptide). Alternatively, an exogenous polypeptide described herein (e.g., a wild-type or loadable exogenous antigen presenting polypeptide or an exogenous antigenic polypeptide(s)) can be engineered to include either a SpyTag or SpyCatcher polypeptide. For example, in some embodiments, a wild-type or loadable exogenous antigen presenting polypeptide comprises an N-terminal SpyCatcher polyepeptide and an exogenous antigenic polypeptide comprises a SpyTag polypeptide. Upon contacting of the SpyTag and SpyCatcher polypeptides, a covalent bond can be formed (see, e.g., Zakeri et al. (2012) Proc. Nat'l. Acad. Sci. U.S.A. 109: E690-7.

[0283] Exogenous polypeptides provided herein (e.g., a wild-type or loadable exogenous antigen presenting polypeptide or an exogenous antigenic polypeptide(s)) can be conjugated onto engineered erythroid cells or enucleated cells described herein, and/or the exogenous polypeptides (e.g., a wild-type or loadable exogenous antigen presenting polypeptide or an exogenous antigenic polypeptide(s)) can be conjugated to one another, using combination methods (e.g., an enzymatic conjugation in combination with click chemistry). For example, a sortase-mediated conjugation can be used to attach a click-chemistry handles (e.g., an azide or an alkyne) onto a cell or an exogenous polypeptide. Subsequently, click chemistry (e.g., a cyclo-addition reaction) can be used to conjugate an additional exogenous polypeptide onto the cell, or onto an exogenous polypeptide (e.g., an exogenous antigenic polypeptide to a wild-type or loadable exogenous antigen presenting polypeptide); see, e.g., Neves et al. (2013) Bioconjugate Chemistry 24(6): 934-41. Sortase-mediated modification of proteins and cells is described in International Publication Nos. WO 2014/183066 and WO 2014/183071, both of which are incorporated by reference in their entireties herein.

[0284] The engineered erythroid cells (e.g., engineered enucleated erythroid cells) or enucleated cells (e.g., modified enucleated cells), described herein can also be produced using one or more of the coupling reagents, as described herein, for e.g., click chemistry, to attach an exogenous polypeptide (e.g., a wild-type or loadable exogenous antigen-presenting polypeptide) to the surface of the cell. In some embodiments, coupling reagents, for e.g., transglutaminase-mediated conjugation and fucosylation-mediated conjugation can be used to couple an exogenous antigenic polypeptide to a wild-type or loadable exogenous antigen-presenting polypeptide, wherein thereafter the complex of the wild-type or loadable exogenous antigen-presenting polypeptide bound to an exogenous antigenic polypeptide, can be attached to the surface of the cell, using one of the coupling reagents described herein, for e.g., click chemistry.

[0285] In some embodiments, the methods of conjugating an exogenous antigenic polypeptide to a loadable exogenous antigen-presenting polypeptide, as described herein, can be performed after a displaceable exogenous polypeptide that was previously bound to the loadable exogenous antigen-presenting polypeptide has been displaced from the loadable exogenous antigen-presenting polypeptide (e.g., using a method described herein).

[0286] In some embodiments, the methods of conjugating an exogenous antigenic polypeptide to a wild-type or loadable exogenous antigen-presenting polypeptide, as described herein, can be performed using a wild-type or loadable exogenous antigen-presenting polypeptide, wherein a displaceable exogenous polypeptide was not previously bound to the wild-type or loadable exogenous antigen-presenting polypeptide.

[0287] While some exemplary methods for conjugating an exogenous antigenic polypeptide to the wild-type or loadable exogenous antigen-presenting polypeptide are provided herein, these are exemplary and not meant to limit the scope of the present disclosure. Additional suitable methods for conjugating an exogenous antigenic polypeptide to a wild-type or loadable exogenous antigen-presenting polypeptide will be apparent to those of skill in the art.

### Exogenous Costimulatory Polypeptides

[0288] In some embodiments, an engineered erythroid cell or enucleated cell provided herein includes an exogenous costimulatory polypeptide. In some embodiments, the exogenous costimulatory polypeptide is capable of specifically binding to a cognate costimulatory molecule on a T cell (e.g., an HLA molecule, B and T lymphocyte attenuator (CD272) and a Toll ligand receptor), thereby providing a signal which mediates a T cell response, including, but not limited to, proliferation, activation, differentiation, and the like. Exogenous costimulatory polypeptides may also include antibodies that specifically bind costimulatory molecules present on a T cell. Such antibody preferably binds and acts as an agonist to the costimulatory molecule on the T cell.

[0289] In some embodiments, the desired response is cell death, e.g., of an infected cell. In some embodiments, the costimulatory polypeptides trigger multiple T cell activation pathways to induce an immune response. In some embodiments, an engineered erythroid cell or enucleated cell described herein includes, inter alia, one or more exogenous costimulatory polypeptides capable of promoting T cell proliferation. In some embodiments, the one or more (e.g., 2, 3, 4, or 5 or more) costimulatory polypeptides comprise an activating polypeptide of Table 9, below, or a T-cell activating variant (e.g., fragment) thereof. In some embodiments, one or more (e.g., 2, 3, 4, or 5 or more) costimulatory polypeptides comprise an antibody molecule (e.g. agonizing antibody) that binds a target receptor of Table 9 or a T-cell activating variant (e.g., fragment) thereof. In some embodiments, the costimulatory polypeptides comprise different T cell activation ligands, e.g., one or more activating polypeptides of Table 9, in any combination thereof, to stimulate T cells. In some embodiments, the engineered erythroid cell or enucleated cell comprises at least one exogenous costimulatory polypeptide on the cell surface comprising either 4-1BBL, OX40L, and CD40L, or fragments or variants thereof. In some embodiments, these exogenous costimulatory polypeptides are capable of signaling through complementary activation pathways. The exogenous costimulatory polypeptides can be derived from endogenous T cell activation ligands or from antibody molecules to the target receptors.

TABLE 9
Costimulatory Polypeptides

| Activating Polypeptide (Ligand) | Target Receptor |
|---|---|
| B7-H2 (e.g., Accession Number | ICOS, CD28 (e.g., Accession |
| NP_056074.1) | Number NP_006130.1) |
| B7-1 (e.g., Accession Number | CD28 (e.g., Accession Number |
| NP_005182.1) | NP_006130.1) |
| B7-2 (e.g., Accession Number | CD28 (e.g., Accession Number |
| AAA86473) | NP_006130.1) |
| CD70 (e.g., Accession Number | CD27 (e.g., Accession Number |
| NP_001243.1) | NP_001233.1) |
| LIGHT (e.g., Accession Number | HVEM (e.g., Accession Number |
| NP_003 798.2) | AAQ89238.1) |
| HVEM (e.g., Accession Number | LIGHT (e.g., Accession Number |
| AAQ89238.1) | NP_003798.2) |
| CD40L (e.g., Accession Number | CD40 (e.g., Accession Number |
| BAA06599.1) | NP_001241.1) |
| 4-1BBL (e.g., Accession Number | 4-1BB (e.g., Accession |
| NP_003802.1) | NP_001552.2) |
| OX40L (e.g., Accession Number | OX40 (e.g., Accession Number |
| NP_003317.1) | NP_003318.1) |
| TL1A (e.g., Accession Number | DR3 (e.g., Accession Number |
| NP_005109.2) | NP_683866.1) |
| GITRL (e.g., Accession Number | GITR (e.g., Accession Number |
| NP_005083.2) | NP_004186.1) |
| CD30L (e.g., Accession Number | CD30 (e.g., Accession Number |
| NP_001235.1), | NP_001234.3) |
| TIM4 (e.g., Accession Number | TIM1 (e.g., Accession Number |
| NP_612388.2) | NP_036338.2) |
| SLAM (e.g., Accession Number | SLAM (e.g., Accession Number |
| AAK77968.1) | AAK77968.1) |
| CD48 (e.g., Accession Number | CD2 (e.g., Accession Number |
| CAG33293.1) | NP_001315538.1) |
| CD58 (e.g., Accession Number | CD2 (e.g., Accession Number |
| CAG33220.1) | NP_001315538.1) |
| CD155 (e.g., Accession Number | CD226 (e.g., Accession Number |
| NP_001129240.1) | NP_006557.2) |
| CD112 (e.g., Accession Number | CD226 (e.g., Accession Number |
| NP_001036189.1) | NP_006557.2) |
| CD137L (e.g., Accession Number | CD137 (e.g., Accession |
| NP_003802.1) | NP_001552.2) |

[0290] In some embodiments, the exogenous costimulatory polypeptide comprises an N-terminal truncated 4-1BBL. In some embodiments, the exogenous costimulatory polypeptide comprises a full length 4-1BBL.

[0291] In some embodiments, the one or more exogenous costimulatory polypeptides comprises an activating cytokine, interferon or TNF family member, e.g., IFNα, IL2, IL6 or any combination thereof. In some embodiments, the one or more exogenous costimulatory polypeptides comprises one or more activating cytokine, interferon or TNF family member, and further comprises one or more activating polypeptide or ligand (e.g., of Table 9) or a T-cell activating variant (e.g., fragment) thereof, or one or more antibody molecules (e.g. agonizing antibody) that binds a target costimulatory T cell receptor (e.g., of Table 9) or a T-cell activating variant (e.g., fragment) thereof.

[0292] In certain embodiments, the disclosure features engineered erythroid cells (e.g., engineered enucleated erythroid cells) or enucleated cells (e.g., modified enucleated cells) that can be used to specifically induce proliferation of a T cell expressing a known co-stimulatory molecule. T cell that are contacted (e.g., in vivo or in vitro) with an engineered erythroid cell or enucleated cell presenting (e.g. comprising on the cell surface) an exogenous costimulatory polypeptide that specifically binds to a co-stimulatory molecule expressed by the T-cell can be expanded, stimulated and/or induced to proliferate such that a large numbers of specific T cells can be readily produced. The engineered erythroid cell or enucleated cell can expand the T cell specifically in that only T cells expressing the particular costimulatory molecule are expanded. Thus, where the T cell to be expanded is present in a mixture of cells, only the T cell of interest will be induced to proliferate and expand. The T cell can be further purified using a wide variety of cell separation and purification techniques, such as those known in the art and/or described elsewhere herein.

[0293] As would be appreciated by the skilled artisan, based upon the disclosure provided herein, the T cell of interest need not be identified or isolated prior to expansion using the engineered erythroid cell or enucleated cell because only T cell(s) expressing the cognate costimulatory molecule will be induced to expand.

[0294] In some embodiments, an engineered erythroid cell (e.g., engineered enucleated erythroid cell) or enucleated cell (e.g., modified enucleated cell) targets multiple T cell activating pathways in combination (e.g., as described in Table 9, above), e.g., using exogenous costimulatory polypeptides comprising ligands or antibody molecules, or both, co-expressed (or co-presented) on an engineered erythroid cell or enucleated cell.

[0295] In some embodiments, the at least one exogenous costimulatory polypeptide comprises either 4-1BBL, LIGHT, CD80, CD86, CD70, IL-7, IL-12, OX40L, GITRL, TIM4, SLAM, CD48, CD58, CD83, CD155, CD112, IL-15Ra fused to IL-15, IL-2, IL-21, a ligand for ICAM-1, a ligand for LFA-1, a functional fragment thereof, and combinations thereof. In some embodiments, the at least one exogenous costimulatory polypeptide is an agonist antibody to a cognate costimulatory ligand receptor. For example, in certain embodiments, the costimulatory polypeptide comprises an antibody (e.g., an agonist antibody) to 4-1BB (e.g., urelumab (Bristol-Myers Squibb), utomilumab (Pfizer), ATOR-1017 (Alligator Bioscience), AGEN2373 (Agenus), CTX-471 (Compass Therapeutics), ADG106 (Adagene), and LVGN6051 (Lyvgen Biopharma)), LIGHT receptor (HVEM), CD80 receptor, CD86 receptor, OX40 (e.g., MEDI6469 (Medimmune), ivuxolimab (Pfizer), GSK3174998 (GlaxoSmithKline), BMS-986178 (Bristol-Myers Squibb), vonlerizumab (Genentech), KHK4083 (Kirin Pharma), tavolimab (Medimmune), INCAGN1949 (Agenus), GBR 830 (Ichnos), MEDI6383 (Medimmune), IBI101 (Innovent), BGB-A445 (BeiGene), and INBRX-106 (Inhibrx)), ICOS (e.g., GSK3359609 (GlaxoSmithKline), MEDI-570 (Medimmune), vopratelimab (Jounce Therapeutics), KY1044 (Kymab), GITR, TIM4 receptor (TIM1), SLAM receptor, CD28 (e.g., lulizumab (Bristol-Myers Squibb), TABO8 (TheraMab), FR104 (OSE Immunotherapeutics), TGN1412 (Tegenero)), CD40 (e.g., dacetuzumab (Genentech), APX005 (Apexigen), iscalimab (Novartis), selicrelumab (Hoffmann-La Roche), BI 655064 (Boehringer), bleselumab (Astellas), lucatumumab (Novartis), RG7876 (Genentech), FFP104 (Fast Forward Pharma), mitazalimab (Alligator Bioscience), Chi Lob 7/4 (Cancer Research UK), 2141-V11 (Bristol-Myers Squibb), SEA-CD40 (Seattle Genetics), CDX-1140 (Celldex), NG-350A (PsiOxus), XmAb 5485 (Xencor), PG120 (PanGenetics), teneliximab (Bristol-Myers Squibb), SBT-040 (Opi Vi), ravagalimab (Abbvie)), CD48 receptor (CD2), CD58 receptor (CD2), CD83 receptor, CD155 receptor (CD226), CD112 receptor (CD226), IL-2 receptor (CD25, CD122, CD132), IL-21 receptor, ICAM, and combinations thereof, or an antigen-binding fragment therof (e.g., an scFV). In some embodiments, the at least one exogenous costimulatory polypeptides comprises an anti CD3 antibody, an anti-CD38 antibody, and combinations thereof, or an antigen-binding fragment therof.

[0296] In some embodiments, the engineered erythroid cell or enucleated cell presents, e.g. comprises on the cell surface, at least two, at least 3, at least 4, or at least 5 exogenous costimulatory polypeptides. In some embodiments, the exogenous costimulatory polypeptides are fused to each other, for example IL-21 fused to IL-2.

[0297] In some embodiments, the one or more exogenous costimulatory polypeptides include or are fused to a transmembrane domain. In some embodiments, the transmembrane domain is selected from a sequence set forth in Table 2. In some embodiments, the one or more exogenous costimulatory polypeptides include or are fused to a leader sequence. In some embodiments, the leader sequence is selected from a sequence set forth in Table 1.

### Exogenous Co-inhibitory Polypeptides

[0298] In some embodiments, an engineered erythroid cell or enucleated cell provided herein includes an exogenous co-inhibitory polypeptide. An exogenous co-inhibitory polypeptide is any polypeptide that suppresses a T cell, including inhibition of T cell activity, inhibition of T cell proliferation, anergizing of a T cell, or induction of apoptosis of a T cell. In some embodiments, an exogenous co-inhibitory polypeptide is capable of specifically binds to a cognate coinhibitory molecule on a T cell. In some embodiments, the exogeonous co-inhibitory polypeptide ligand is an inhibitory polypeptide shown in Table 10.

[0299] In some embodiments, the exogenous co-inhibitory polypeptide comprises an agonist (e.g. an antibody) that specifically binds a coinhibitory receptor on a T cell. In some embodiments, the agonist is an antibody that binds a receptor selected from the group consisting of: PD1, CTLA4, TIM3, CEACAM (e.g., CEACAM-1, CEACAM-3 and/or CEACAM-5), LAG3, VISTA, BTLA, TIGIT, LAIR1, CD160, and 2B4. In other embodiments, the agonist is an antibody that binds a target receptor on a T cell shown in Table 10.

TABLE 10
Coinhibitory Polypeptides

| Inhibitory Polypeptide | Target Receptor |
|---|---|
| B7-1 | CTLA4, B7H1 |
| B7-2 | CTLA4 |
| B7DC | PD1 |
| B7H1 | PD1, B7-1 |
| HVEM | CD160, BTLA |
| COLLAGEN | LAIR1 |
| GALECTIN9 | TIM3 |
| CD48, TIM4 | TIM4R |
| CD48 | 2B4 |
| CD155, CD112, CD113 | TIGIT |
| PDL1 | PD1 |
| | LAG3 |

[0300] In some embodiments, an exogenous co-inhibitory polypeptide comprises an antibody (or an antigen-binding fragment therof (e.g., an scFv)) that blocks binding of a costimulatory polypeptide to its cognate costimulatory receptor. In various embodiments, the exogenous co-inhibitory polypeptide comprises an antibody (or an antigen-binding fragment therof) that blocks binding of 4-1BBL, LIGHT, CD80, CD86, CD70, OX40L, GITRL, TIM4, SLAM, CD48, CD58, CD83, CD155, CD112, IL-15Rα fused to IL-15, IL-2, IL-21, ICAM, a ligand for LFA-1, an anti CD3 antibody or an anti CD28 antibody, to its receptor.

[0301] In some embodiments, the exogenous co-inhibitory polypeptide comprises IL-35, IL-10, or VSIG-3, or a functional fragment thereof. In some embodiments, the exogenous co-inhibitory polypeptide comprises VSIG-3, or a functional fragment thereof.

[0302] In some embodiments, an engineered erythroid cellor enucleated cell targets multiple T cell inhibitory pathways in combination (e.g., as described in Table 10, above), e.g., using exogenous co-inhibitory polypeptides comprising ligands or antibody molecules, or both, co-expressed on the engineered erythroid cell or enucleated cell.

[0303] In some embodiments, the engineered erythroid cell or enucleated cell presents, e.g. comprises on the cell surface, at least two, at least 3, at least 4, or at least 5 exogenous co-inhibitory polypeptides.

[0304] In some embodiments, the one or more exogenous co-inhibitory polypeptides include or are fused to a transmembrane domain. In some embodiments, the transmembrane domain is selected from a sequence set forth in Table 2. In some embodiments, the one or more exogenous co-inhibitory polypeptides include or are fused to a leader sequence. In some embodiments, the leader sequence is selected from a sequence set forth in Table 1.

### T-Cell Activation Signals

[0305] For efficient induction of T-cell proliferation, activation and expansion, several signals need to be transmitted from the engineered erythroid cell (e.g., engineered enucleated erythroid cell) or enucleated cell (e.g., modified enucleated cell) to naïve T cells. These signals are commonly referred to as Signal 1, Signal 2 and Signal 3, and are described below. In some embodiments, Signal 1 comprises a loadable exogenous antigen-presenting polypeptide on the cell surface, wherein the loadable exogenous antigen-presenting polypeptide comprises one or more amino acid substitutions which stabilize the loadable exogenous antigen-presenting polypeptide on the cell surface, further comprising an exogenous antigenic polypeptide bound to the loadable exogenous antigen-presenting polypeptide. In some embodiments, Signal 1 comprises a wild-type exogenous antigen-presenting polypeptide. In some embodiments, the engineered erythroid cells or enucleated cells described herein comprise one or more exogenous polypeptides comprising Signal 1, one or more exogenous polypeptides comprising Signal 2, and/or one or more exogenous polypeptides comprising Signal 3, in any combination as set forth below. In some embodiments, in addition to Signal 1, Signal 2 and Signal 3, the engineered erythroid cells or enucleated cells described herein further comprise one or more exogenous polypeptides comprising one or more cell adhesion molecules to further facilitate the interaction between T-cells and the engineered erythroid cells or enucleated cells. It is to be understood that when an engineered erythroid cell or enucleated cell comprises the one or more exogenous polypeptides comprising Signal 1 and/or the one or more exogenous polypeptides comprising Signal 2 and/or the one or more exogenous polypeptides comprising Signal 3 (and optionally the one or more polypeptides comprising a cell adhesion molecules), the exogenous polypeptides comprising Signal 1 and/or Signal 2 and/or Signal 3 and/or a cell adhesion molecule are all comprised on the same engineered erythroid cells or enucleated cells.

[0306] The engineered erythroid cells or enucleated cells described herein offer numerous advantages over the use of spherical nanoparticles, such as rigid, bead-based APCs. For example, the membrane of an engineered erythroid cell or enucleated cell as described herein is much more dynamic and fluid than the outer surface of a nanoparticle, which is rigid and immobile, and therefore limits the movement of the polypeptides on its surface. The fluidity of the engineered erythroid cell or enucleated cell membrane allows for greater molecular mobility and more efficient molecular reorganization, and is advantageous for immunological synapse formation and T cell stimulation. In some embodiments, the engineered erythroid cells or enucleated cells described herein comprising one or more exogenous polypeptides comprising Signal 1, one or more exogenous polypeptides comprising Signal 2, and/or one or more exogenous polypeptides comprising Signal 3, in any combination as set forth below, on the surface of the cells, provide a more controlled stimulation of T-cells, thereby allowing for the propagation of T-cells with a specific phenotype and activity. In some embodiments, by engineering the engineered erythroid cells or enucleated cells to comprise Signal 1 and/or Signal 2 and/or Signal 3 on the surface of the cell, the engineered erythroid cells or enucleated cells provide optimal control over the signals provided to T-cells.

[0307] The engineered erythroid cells or enucleated cells described herein, e.g., comprising the one or more exogenous polypeptides comprising Signal 1 and/or the one or more exogenous polypeptides comprising Signal 2 and/or the one or more exogenous polypeptides comprising Signal 3 (and optionally the one or more polypeptides comprising a cell adhesion molecules), can be used to activate an antigen-specific T cell population, by contacting the T cell population with the engineered enucleated erythroid cell, thereby activating the antigen-specific T cell population. In some embodiments, the engineered enucleated erythroid cell described herein can be contacted with multiple antigen-specific T cell populations to allow the activation of the multiple antigen-specific T cell populations. In some embodiments, the engineered enucleated erythroid cell comprising one or more exogenous antigenic polypeptides can be contacted with one or more antigen-specific T cell populations, to allow the activation of the one or more antigen-specific T cell populations. In some embodiments, the engineered enucleated erythroid cell comprising two or more exogenous antigenic polypeptides can be contacted with two or more antigen-specific T cell populations, to allow the activation of the two or more antigen-specific T cell populations. In some embodiments, the engineered enucleated erythroid cell comprising three or more exogenous antigenic polypeptides can be contacted with three or more antigen-specific T cell populations, to allow the activation of the three or more antigen-specific T cell populations. In some embodiments, the engineered enucleated erythroid cell comprising four or more exogenous antigenic polypeptides can be contacted with four or more antigen-specific T cell populations, to allow the activation of the four or more antigen-specific T cell populations. In some embodiments, the engineered enucleated erythroid cell comprising five or more exogenous antigenic polypeptides can be contacted with five or more antigen-specific T cell populations, to allow the activation of the five or more antigen-specific T cell populations. In some embodiments, the one, two, three, four, five or more exogenous antigenic polypeptides may be present on the same engineered enucleated erythroid cell, or they may be present on distinct engineered enucleated erythroid cells.

[0308] The one or more exogenous antigenic polypeptides may comprise any antigenic polypeptide described herein. In some embodiments, the one or more exogenous antigenic polypeptides comprises an HPV-E6 antigen. In some embodiments, the one or more exogenous antigenic polypeptides comprises an HPV-E7 antigen. In some embodiments, the two or more exogenous antigenic polypeptides comprise an HPV-E6 antigen and an HPV-E7.

[0309] Signal 1—Antigen Recognition

[0310] T cell activation occurs after a T cell receptor (TCR) recognizes a specific peptide antigen presented on an exogenous antigen-binding polypeptide of an engineered erythroid cell or enucleated cell as described herein. Generally, exogenous antigenic polypeptides presented on an exogenous antigen-binding polypeptides comprising a HLA class II polypeptide are recognized by the TCR in conjunction with the CD4 T cell co-receptor. Exogenous antigenic polypeptides presented on an exogenous antigen-binding polypeptides comprising a HLA class I polypeptide are recognized by the TCR in conjunction with a CD8 T cell co-receptor. Ligation of the TCR by a peptide-HLA complex leads to transduction of the signals necessary for activation of the T cell.

[0311] In some embodiments, Signal 1 comprises one or more exogenous polypeptides comprising a wild-type or loadable exogenous antigen-presenting polypeptide. In some embodiments, Signal 1 comprises a loadable exogenous antigen-presenting polypeptide on the cell surface, wherein the loadable exogenous antigen-presenting polypeptide comprises one or more amino acid substitutions which stabilize the loadable exogenous antigen-presenting polypeptide on the cell surface, further comprising an exogenous antigenic polypeptide bound to the loadable exogenous antigen-presenting polypeptide. In some embodiments, Signal 1 comprises a wild-type exogenous antigen-presenting polypeptide comprising a exogenous antigenic polypeptide bound thereto. In some embodiments, the wild-type or loadable exogenous antigen-presenting polypeptide comprises an HLA class I polypeptide, an HLA class I single chain fusion, an HLA class II polypeptide, or an HLA class II single chain fusion, as provided above. In some embodiments, the HLA class I polypeptide is selected from a HLA-A, a HLA-B, a HLA-C, a HLA-E, and a HLA-G polypeptide (or fragments thereof). In some embodiments, the HLA class II polypeptide is selected from a HLA-DPα, a HLA-DPβ, a HLA-DMA, a HLA-DMB, a HLA DOA, a HLA DOB, a HLA DQα, a HLA DQβ, a HLA DRα, and a HLA DRβ, or fragments thereof, and combinations thereof.

[0312] Signal 2—Co-Stimulation

[0313] To become fully activated, T cells require a second signal in addition to TCR-mediated antigen recognition. This second signal (i.e., Signal 2), or co-stimulation, is important for proper T cell activation. In some embodiments, Signal 2 comprises one or more exogenous costimulatory polypeptides provided herein. In some embodiments, the one or more exogenous costimulatory polypeptides comprise 4-1BBL, LIGHT, anti CD28, CD80, CD86, CD70, OX40L, GITRL, TIM4, SLAM, CD48, CD58, CD83, CD155, CD112, IL-15, IL-15Ra fused to IL-15, IL-21, ICAM-1, a ligand for LFA-1, anti CD3 antibody, fragments thereof, and any combination thereof. In some embodiments, Signal 2 comprises one or more exogenous costimulatory polypeptides comprising 4-1BBL, CD80, CD86, CD83, CD70, LIGHT, HVEM,CD40L, OX40L, TL1A, GITRL, CD3OL, and fragments thereof.

[0314] Signal 3—Cytokines

[0315] To induce more efficient expansion and specific differentiation of T cells, a third signal (Signal 3) can be used. Therefore, an engineered erythroid cell or enucleated cell provided herein can further include an exogenous polypeptide comprising Signal 3 (e.g., a cytokine, a co-inhibitory polypeptide, or fragments thereof). In some embodiments, Signal 3 comprises one or more exogenous polypeptides comprising one or more cytokines. In some embodiments, Signal 3 comprises one or more exogenous polypeptides selected from the group consisting of IL-2, IL-15, IL-7, IL-12, IL-18, IL-21, IL-4, IL-6, IL-23, IL-27, IL-17, IL-10, TGF-beta, IFN-gamma, IL-1 beta, GM-CSF, IL-15, IL-15Rα fused to IL-15, and IL-25, or fragments thereof.

[0316] In addition to immunostimulatory cytokines, immunoinhibitory cytokines are capable of dampening the immune response or can lead to tolerance. Accordingly, in some embodiments, Signal 3 comprises one or more exogenous co-inhibitory polypeptides. In some embodiments, the one or more exogenous co-inhibitory polypeptide comprise IL-35, IL-10, VSIG-3, or a LAG3 agonist, and fragments thereof.

### Cell Adhesion Molecules

[0317] In some embodiments, in addition to Signal 1, Signal 2 and/or Signal 3, the engineered erythroid cells or enucleated cells described herein further comprise at the cell surface one or more exogenous polypeptides comprising a cell adhesion molecule. Cell adhesion molecules further facilitate the integration between T-cells and the engineered erythroid cells or enucleated cells. In some embodiments, the engineered erythroid cells or enucleated cell comprise an exogenous polypeptide comprising a cell adhesion molecule that mediates or facilitates the formation of the immunological synapse. In some embodiments, the exogenous polypeptide comprises one or more cell adhesion molecules selected from ICAM4/LW, CD36, CD58/LFA3, CD47, VLA4, BCAM/Lu, CD44, CD99/MIC2, ICAM1, JAM1, CD147, fragments thereof, or any combination thereof.

[0318] In some embodiments, the engineered erythroid cell or enucleated cell comprises at the cell surface an exogenous polypeptide comprising Signal 1, an exogenous polypeptide comprising Signal 2, and one or more exogenous polypeptides comprising a cell adhesion molecule. In some embodiments, the engineered erythroid cell or enucleated cell comprises at the cell surface an exogenous polypeptide comprising Signal 1, an exogenous polypeptide comprising Signal 2, an exogenous polypeptide comprising Signal 3, and one or more exogenous polypeptides comprising a cell adhesion molecule.

[0319] In some embodiments, the engineered erythroid cell or enucleated cell comprises at the cell surface more than one exogenous polypeptide comprising more than one Signal 1, an exogenous polypeptide comprising Signal 2, and one or more exogenous polypeptides comprising cell adhesion molecules. In some embodiments, the engineered erythroid cell or enucleated cell comprises at the cell surface more than one exogenous polypeptide comprising more than one Signal 1, an exogenous polypeptide comprising Signal 2, an exogenous polypeptide comprising Signal 3, and one or more exogenous polypeptides comprising cell adhesion molecules.

[0320] In some embodiments, the engineered erythroid cell or enucleated cell comprises at the cell surface an exogenous polypeptide comprising Signal 1, more than one exogenous polypeptide comprising more than one Signal 2, and one or more exogenous polypeptides comprising a cell adhesion molecule. In some embodiments, the engineered erythroid cell or enucleated cell comprises at the cell surface an exogenous polypeptide comprising Signal 1, more than one exogenous polypeptide comprising more than one Signal 2, an exogenous polypeptide comprising Signal 3, and one or more exogenous polypeptides comprising a cell adhesion molecule.

[0321] In some embodiments, the engineered erythroid cell or enucleated cell comprises at the cell surface an exogenous polypeptide comprising Signal 1, an exogenous polypeptide comprising Signal 2, more than one exogenous polypeptide comprising more than one Signal 3, and one or more exogenous polypeptides comprising a cell adhesion molecule.

[0322] In some embodiments, the engineered erythroid cell or enucleated cell comprises at the cell surface more than one exogenous polypeptide comprising more than one Signal 1, an exogenous polypeptide comprising Signal 2, more than one exogenous polypeptide comprising more than one Signal 3, and one or more exogenous polypeptides comprising a cell adhesion molecule.

[0323] In some embodiments, the engineered erythroid cell or enucleated cell comprises at the cell surface more than one exogenous polypeptide comprising more than one Signal 1, more than one exogenous polypeptide comprising more than one Signal 2, an exogenous polypeptide comprising Signal 3, and one or more exogenous polypeptides comprising a cell adhesion molecule.

[0324] In some embodiments, the engineered erythroid cell or enucleated cell comprises at the cell surface more than one exogenous polypeptide comprising more than one Signal 1, more than one exogenous polypeptide comprising more than one Signal 2, more than one exogenous polypeptide comprising more than one Signal 3, and one or more exogenous polypeptides comprising a cell adhesion molecule.

[0325] In some embodiments, the one or more exogenous polypeptides comprising Signal 1, the one or more exogenous polypeptides comprising Signal 2, the one or more exogenous polypeptides comprising Signal 3, and the one or more exogenous polypeptides comprising a cell adhesion molecule are selected from the exogenous polypeptides shown in Table 11.

TABLE 11
Cell Adhesion Molecules

| | |
|---|---|
| Signal 1 | A wild-type or loadable exogenous antigen- |
| | presenting polypeptide on the cell surface. |
| Signal 2 | 4-1BBL; CD80; CD86; CD83; CD70; |
| | LIGHT; HVEM; CD40L; OX40L; TL1A; |
| | GITRL; and CD30L |
| Signal 3 | IL-2; IL-15; IL-7; IL-12; IL-18; IL-21; IL-4; |
| | IL-6; IL-23; IL-27; IL-17; IL-10; TGF-beta; |
| | IFN-gamma; IL-1 beta; GM-CSF; and IL-25 |
| Adhesion Molecules | ICAM4/LW; CD36; CD58/LFA3; CD47; |
| | VLA4; BCAM/Lu; CD44; CD99/MIC2; |
| | ICAM1; JAM1 and CD147 |

### Immunological Synapse

[0326] As described herein, the engineered erythroid cells or enucleated cells of the present disclosure provide numerous advantages over the use of spherical nanoparticles, such as rigid, bead-based engineered erythroid cells or enucleated cells. Molecular mobility (e.g. movement of ligands in the cell membrane) and molecular clustering are important features of immunological synapse formation. The membrane of engineered erythroid cell or enucleated cell described herein is much more dynamic and fluid than the outer surface of a nanoparticle, and thus allows a much more efficient molecular reorganization and MEW clustering during the formation of an immunological synapse, or in mediating trogocytosis. Further, in contrast to the small size of the nanoparticles, the engineered erythroid cells or enucleated cells described herein a greater surface area for the formation of functional micron-scaled clusters in an immunological synapse. In some embodiments, the engineered erythroid cells or enucleated cells as described herein are engineered to form an immunological synapse, wherein the immunological synapse facilitates T cell activation.

[0327] An immunological synapse (or immune synapse, or IS) is the interface between an antigen-presenting cell and a lymphocyte such as a TB cell or an NK cell. An immunological synapse can consist of molecules involved in T cell activation, which compose typical patterns, called activation clusters. According to the most well studied model, the immune synapse is also known as the supramolecular activation cluster (SMAC) (Monks et al. (1998) Nature 395(6697): 82-6; incorporated in their entirety herein by reference), which is composed of concentric rings (central, peripheral or distal regions) each containing segregated clusters of proteins. Molecules in the immunological synapse include wild-type or loadable exogenous antigen-presenting polypeptides, adhesion molecules, co-stimulatory molecules, and co-inhibitory molecules.

[0328] The immunological synapse is a dynamic structure formed after T cell receptors cluster together in microclusters that eventually move towards the immunological synapse center. The spatial and temporal changes of these molecules at the interface of T lymphocyte and APC regulate the structure of the immune synapse and T lymphocyte immune response. In general, efficient CD4+ and CD8+ T cell activation is associated with the formation of a functional immunological synapse (Kaizuka et al. (2007) Proc. Natl. Acad. Sci. U.S.A. 104: 20296-301, incorporated by reference in its entirety herein).

[0329] In some embodiments, the disclosure features an engineered erythroid cell or enucleated cell that can form an immunological synapse between the engineered erythroid cell or enucleated cell and an immune cell such as a T cell, B cell or an NK cell. In some embodiments, the engineered erythroid cell or enucleated cell provided herein has the ability to assemble more than one exogenous antigen-presenting polypeptide in the immunological synapse.

[0330] The initial interaction at the immunological synapse occurs between the lymphocyte function-associated antigen-1 (LFA-1) present in the peripheral-SMAC of a T-cell, and integrin adhesion molecules (such as ICAM-1 or ICAM-2) on an APC. When bound to an APC, the T-cell can then extend pseudopodia and scan the surface of target cell to find a specific peptide-MHC complex. The process of formation begins when the T-cell receptor (TCR) binds to the peptide-MHC complex on the APC and initiates signaling activation through formation of microclusters/lipid rafts (Varma et al. (2006) Immunity 25(1): 117-27; incorporated in their entirety herein by reference).

[0331] Accordingly, in some embodiments, the engineered erythroid cells or enucleated cells of the present disclosure comprise one or more exogenous cell adhesion polypeptides to mediate or facilitate the formation of the immunological synapse. In some embodiments, the one or more cell adhesion molecule is selected from the group consisting of ICAM4/LW, CD36, CD58/LFA3, CD47, VLA4, BCAM/Lu, CD44, CD99/MIC2, ICAM1, JAM1, and CD147, fragments thereof, or any combination thereof.

[0332] It is an advantage of the engineered erythroid cells or enucleated cells described herein have a fluid cell membrane that provides dynamic molecular movement and thus allows efficient molecular reorganization and MHC clustering, which is required for T cell stimulation. Signaling is initiated and sustained in TCR microclusters that are formed continuously in the periphery of the immunological synapse and transported to the center to form the central SMAC. During the formation of the central SMAC the microclusters can move independently of each other, and can fuse to form larger clusters with continuous movements. A threshold MHCI cluster density is required to sustain active immune signaling (Anikeeva et al. (2012) PLoS One 7(8): e41466; Bullock et al. (2000) J. Immunol. 164(5): 2354-61; Bullock et al. (2003) J. Immunol. 170(4): 1822-9; Jiang et al. (2011) Immunity 34(1): 13-23; each of which is incorporated in its entirety herein by reference). Accordingly, in some embodiments, an engineered erythroid cell or enucleated cell provided herein can mediate the clustering of exogenous antigen-presenting polypeptides at a density that is effective to form a functional immunological synapse and to activate immune signaling.

[0333] Another consequence of the molecular reorganization in immune synapse formation is the intercellular transfer of APC membrane proteins to the T cell. T cells acquire MHC class I and class II glycoproteins from APCs, together with co-stimulatory molecules and membrane patches, by a mechanism referred to as trogocytosis. As described herein, the membrane of an engineered erythroid cell or enucleated cell provided herein allows efficient molecular reorganization and MHC clustering due to its fluidity. In some embodiments, an engineered erythroid cell or enucleated cell described herein allows or mediates the molecular reorganization in immune synapse formation such that trogocytosis occurs.

[0334] The sizes of the immunological synapse can be determined by numerous methods known in the art, including microscopy, such as total internal reflection fluorescence microscopy (TIRFM) (Varma et al. (2006); Dustin et al. (2002) Science 298(5594):785-9; each of which are incorporated in their entirety herein by reference). In some embodiments, an engineered erythroid cell or enucleated cell described herein can form an immunological synapse of an average diameter between about 0.5 μm and 5.0 μm. In some embodiments, an engineered erythroid cell or enucleated cell described herein can form an immunological synapse of an average diameter of at least about 0.5 μm. In some embodiments, an engineered erythroid cell or enucleated cell described herein can form a functional immunological synapse of an average diameter between about 0.5 μm and 4.5 μm, between about 0.5 μm and 4.0 μm, between about 0.5 μm and 3.5 μm, between about 0.5 μm and 3.0 μm, between about 0.5 μm and 2.5 μm, between about 0.5 μm and 2.0 μm, between about 0.5 μm and 1.5 μm, between about 0.5 μm and 1.0 μm, between about 1.0 μm and 5.0 μm, between about 1.0 μm and 4.5 μm, between about 1.0 μm and 4.0 μm, between about 1.0 μm and 3.5 μm, between about 1.0 μm and 3.0 μm, between about 1.0 μm and 2.5 μm, between about 1.0 μm and 2.0 μm, between about 1.0 μm and 1.5 μm, between about 1.5 μm and 5.0 μm, between about 1.5 μm and 4.5 μm, between about 1.5 μm and 4.0 μm, between about 1.5 μm and 3.5 μm, between about 1.5 μm and 3.0 μm, between about 1.5 μm and 2.5 μm, between about 1.5 μm and 2.0 μm, between about 2.0 μm and 5.0 μm, between about 2.0 μm and 4.5 μm, between about 2.0 μm and 4.0 μm, between about 2.0 μm and 3.5 μm, between about 2.0 μm and 3.0 μm, between about 2.0 μm and 2.5 μm, between about 2.0 μm and 5.0 μm, between about 2.5 μm and 4.5 μm, between about 2.5 μm and 4.0 μm, between about 2.5 μm and 3.5 μm, between about 2.5 μm and 3.0 μm, between about 3.0 μm and 5.0 μm, between about 3.0 μm and 4.5 μm, between about 3.0 μm and 4.0 μm, between about 3.0 μm and 3.5 μm, between about 3.5 μm and 5.0 μm, between about 3.5 μm and 4.5 μm, between about 3.5 μm and 4.0 μm, between about 4.0 μm and 5.0 μm, between about 4.0 μm and 4.5 μm, between about 4.5 μm and 5.0 μm. In some embodiments, the engineered erythroid cell or enucleated cell described herein can form a functional immunological synapse of an average diameter of at least 0.5 μm, 0.6 μm, 0.7 μm, 0.8 μm, 0.9 μm, 1.0 μm, 1.5 μm, 2.0 μm, 2.5 μm, 3μm, 3.5 μm, 4.0 μm or 5 μm.

[0335] As described herein, an advantage of the engineered erythroid cells or enucleated cells of the present disclosure is the fluidity of the engineered erythroid cell or enucleated cell membrane that allows efficient molecular reorganization. Specific signaling pathways lead to polarization of the T-cell by orienting its centrosome toward the site of the immunological synapse. The accumulation and polarization of actin is triggered by TCR/CD3 interactions with integrins and small GTPases. These interactions promote actin polymerization, and as actin is accumulated and reorganized, it promotes clustering of the TCRs and integrins. These highly dynamic contacts are characterized by continuous cytoskeletal remodeling events, which not only structure the interface but also exert a considerable amount of mechanical forces, which influence information transfer both into and out of the immune cell (Basu et al. (2017) Trends Cell Biol. 27(4): 241-54; Hivroz et al. (2016) Front Immunol. 7: 46; each of which are incorporated in their entirety herein by reference). The adhesive forces of tensile strengths between the TCRs and integrins at the site of immunological synapse can be determined by, e.g., atomic force microscopy, biomembrane force probe (BFP) technique, traction force microscopy, etc. (see, e.g., Hivroz et al. (2016)).

[0336] In some embodiments, tensile strength is a measure of the adhesive forces between the T cell receptor and the molecules of the immunological synapse, e.g., peptide-MHC complex, formed by the engineered erythroid cell or enucleated cell. In some embodiments, an engineered erythroid cell or enucleated cell is capable of forming an immunological synapse with a tensile strength sufficient to activate an immune cell. In some embodiments, an engineered erythroid cell or enucleated cell of the present disclosure can form a synapse with a tensile strength of between about 1 pN and 30,000 pN. In some embodiments, an engineered erythroid cell or enucleated cell of the present disclosure can form a synapse with a tensile strength of between about 1 pN and 20,000 pN, between about 1 pN and 10,000 pN, between about 1 pN and 9,000 pN, between about 1 pN and 8,000 pN, between about 1 pN and 7,000 pN, between about 1 pN and 6,000 pN, between about 1 pN and 5,000 pN, between about 1 pN and 4,000 pN, between about 1 pN and 3,000 pN, between about 1 pN and 2,000 pN, between about 1 pN and 1,000 pN, between about 1,000 pN and 30,000 pN, between about 1,000 pN and 20,000 pN, between about 1,000 pN and 10,000 pN, between about 1,000 pN and 9,000 pN, between about 1,000 pN and 8,000 pN, between about 1,000 pN and 7,000 pN, between about 1,000 pN and 6,000 pN, between about 1,000 pN and 5,000 pN, between about 1,000 pN and 4,000 pN, between about 1,000 pN and 3,000 pN, between about 1,000 pN and 2,000 pN. In some embodiments, the optimum mechanical force between the peptide-MHC complex (i.e., the exogenous-antigenic polypeptide-exogenous antigen-presenting polypeptide complex) and the TCR at the immunological synapse is at least 1 pN, 1.5 pN, 2.0 pN, 3.0 pN, 4.0 pN, 5.0 pN, 6.0 pN, 7.0 pN, 8.0 pN, 9.0 pN, 10 pN, 20 pN, 30 pN, 40 pN, 50 pN, 60 pN, 70 pN, 80 pN, 90 pN, 100 pN, 500 pN, 1,000 pN, 2,000 pN, 3,000 pN, 4,000 pN, 5,000 pN, 6,000 pN, 7,000 pN, 8,000 pN, 9,000 pN, 10,000 pN, 11,000 pN, 12,000 pN, 13,000 pN, 14,000 pN, 15,000 pN, or 20,000 pN. In some embodiments, an engineered erythroid cell or enucleated cell as described herein can trigger mechanical forces between the peptide-MHC complex and the TCR at the immunological synapse, to activate an immune cell.

### Treg Costimulatory and Coinhibitory Polypeptides

[0337] In certain embodiments, the engineered erythroid cells or enucleated cells further comprise an exogenous Treg costimulatory polypeptide (e.g., to expand regulatory T-cells (Tregs) cells). In some embodiments, the Treg costimulatory polypeptides expand Treg cells by stimulating at least one of three signals involved in Treg cell development. Signal 1 involves TCR, and can be stimulated with antibodies, such as anti-CD3 antibodies, or with antigens that signals through TCR. Signal 2 can be mediated by several different molecules, including immune co-stimulatory molecules such as CD80 and 4-1BBL. Signal 3 is transduced via cytokines, such as IL-2, or TGFβ. In some embodiments, the Treg costimulatory polypeptides stimulate one of these signals. In another embodiment, the Treg costimulatory polypeptides stimulate two of these signals. In yet another embodiment, the Treg costimulatory polypeptides stimulate three of these signals.

[0338] Signal 1

[0339] In some embodiments, the exogenous costimulatory polypeptide comprises an antigen useful as Treg costimulatory polypeptides for stimulating Signal 1, including antigens associated with a target disease or condition. In some embodiments, the exogenous Treg costimulatory polypeptide comprises an autoantigen, insulin (particularly suitable for treating type 1 diabetes), collagen (particularly suitable for treating rheumatoid arthritis), myelin basic protein (particularly suitable for treating multiple sclerosis) or MHC (for treating and preventing foreign graft rejection). The antigens may be administered as part of a conjugate. Optionally, the antigen is provided as part of an MHC/antigen complex. In this embodiment, the MHC and antigen can independently be foreign or syngeneic. For example donor MHC and an allogenic or syngeneic antigen can be used.

[0340] Signal 2

[0341] In some embodiments, the exogenous Treg costimulatory polypeptide for stimulating Signal 2 include a member of the B7 and TNF families, for example B7 and CD28 family members, shown below in Table 12, and TNF family members shown in Table 13, or a fragment thereof.

TABLE 12
Treg Costimulatory Polypeptides: B7 and CD28 Family Members

| LIGAND | RECEPTOR |
|---|---|
| B7.1 (CD80) | CD28, CTLA-4 (CD 152) |
| B7.2 (CD86) | CD28, CTLA-4 |
| ICOSL (B7h, B7-H2, B7RP-1, | ICOS (AILIM) |
| GL5O, LICOS) | |
| PD-L1 (B7-H1) | PD-1 |
| PD-L2 (B7-DC) | PD-1 |
| B7-H3 | Unknown |
| B7-H4 (B7x; B7S1) | Unknown (BTLA?) |
| Unknown (HVEM*) | BTLA |
| ICOSL (B7h, B7-H2, B7RP-1, | ICOS (AILIM) |

TABLE 13
Treg Costimulatory Polypeptides: TNF Family Members

| LIGAND | RECEPTOR |
|---|---|
| OX40L | OX40 (CD134) |
| 4-1BBL | 4-1BB (CD137) |
| CD40L (CD154) | CD40 |
| CD27L (CD70) | CD27 |
| CD30L | CD30 |
| LIGHT | HVEM, LTβR, DcR3 |
| GITRL | GITR |
| BAFF (BLyS) ** | BAFF-R, TACI, BCMA |
| APRIL ** | TACI, BCMA |
| VEGI/TL1A | DR3 |
| TNF alpha (mutants) | TNFR2 |

[0342] Signal 3

[0343] In some embodiments, the exogenous Treg costimulatory polypeptide for stimulating Signal 3 includes a cytokine or growth factors that stimulates Signal 3, such as IL-2, IL-4, and TGF-β (including TGF-β1, TGF-β2 and TGF-β3), or a fragment thereof. IL-2 and IL-4 moieties useful in immunotherapeutic methods are known in the art. See, e.g., Earle et al. (2005), supra; Thorton et al. (2004) J. Immunol. 172: 6519-23; Thorton et al. (2004) Eur. J. Immunol. 34: 366-76. In some embodiments, the mature portion of the cytokine is used.

[0344] In some embodiments, the Treg costimulatory polypeptide comprises a CD25-specific IL-2, or a fragment thereof. In some embodiments, the Treg costimulatory polypeptide comprises TNFR2-specific TNF, or a fragment thereof. In some embodiments, the Treg costimulatory polypeptide comprises an anti-DR3 agonist (VEGUTL1A specific), or a fragment thereof. In some embodiments, the Treg costimulatory peptide comprises 4-1BBL, or a fragment thereof. In some embodiments, the Treg costimulatory peptide comprises TGFbeta, or a fragment thereof.

[0345] In other embodiments, the engineered erythroid cell or enucleated cell comprises an exogenous Treg co-inhibitory polypeptide capable of inhibiting Treg cells. In certain embodiments, Treg inhibition is useful in the treatment of cancer, for example, by targeting chemokines that are involved in Treg trafficking. In some embodiments, the exogenous Treg co-inhibitory polypeptide can target any of the receptors listed in Tables 10 or 11, for example, anti-OX40, anti-GITR or anti-CTLA4, or TLR ligands.

[0346] In some embodiments, the exogenous Treg co-stimulatory polypeptides or exogenous Treg co-inhibitory polypeptide, or an active fragment thereof, can be linked or expressed as a fusion protein with a binding pair member for use as described herein. An exemplary binding pair is biotin and streptavidin (SA) or avidin.

[0347] In some embodiments, the exogenous Treg costimulatory polypeptides, or an active fragment thereof, is part of a fusion protein, comprising a Treg costimulatory polypeptide and a binding pair member, such as CSA. Fusion proteins can be made by any of a number of different methods known in the art. For example, one or more of the component polypeptides of the fusion proteins can be chemically synthesized or can be generated using well known recombinant nucleic acid technology.

[0348] In some embodiments, the engineered erythroid cell or enucleated cell presents, e.g. comprises on the cell surface, at least two, at least 3, at least 4, or at least 5 exogenous Treg co-stimulatory polypeptides.

[0349] In some embodiments, the engineered erythroid cell or enucleated cell presents, e.g. comprises on the cell surface, at least two, at least 3, at least 4, or at least 5 exogenous Treg inhibitory polypeptides.

[0350] In some embodiments, the one or more Treg co-stimulatory or co-inhibitory polypeptides include or are fused to a transmembrane domain. In some embodiments, the transmembrane domain is selected from a sequence set forth in Table 2. In some embodiments, the one or more Treg co-stimulatory or co-inhibitory polypeptides include or are fused to a leader sequence. In some embodiments, the leader sequence is selected from a sequence set forth in Table 1.

### Cytokines/Chemokines

[0351] Additionally, the engineered erythroid cells or enucleated cells provided herein further comprise at least one exogenous polypeptide comprising a cytokine, at least one exogenous polypeptide comprising a chemokine, or both.

[0352] Exemplary cytokines include a hematopoietic growth factor, an interleukin, an interferon, an immunoglobulin superfamily molecule, and a tumor necrosis factor family molecule, granulocyte macrophage colony stimulating factor (GM-CSF), tumor necrosis factor alpha (TNFα), tumor necrosis factor beta (TNFβ), macrophage colony stimulating factor (M-CSF), interleukin-1 (IL-1), interleukin-2 (IL-2), interleukin-4 (IL-4), interleukin-5 (IL-5), interleukin-6 (IL-6), interleukin-7 (IL-7), interleukin-10 (IL-10), interleukin-12 (IL-12), interleukin-15 (IL-15), interleukin-21 (IL-21), interleukin-35 (IL-35), interferon alpha (IFN-α), interferon beta (IFN-β), interferon gamma (IFN-γ), and IGIF, and fragments thereof.

[0353] Exemplary chemokines, include an alpha-chemokine or a beta-chemokine, including, but not limited to, a C5a, interleukin-8 (IL-8), monocyte chemotactic protein lalpha (MIP1α), monocyte chemotactic protein 1 beta (MIP1β), monocyte chemoattractant protein 1 (MCP-1), monocyte chemoattractant protein 3 (MCP-3), platelet activating factor (PAFR), N-formyl-methionyl-leucyl-[³H]phenylalanine (FMLPR), leukotriene B4 (LTB4R), gastrin releasing peptide (GRP), RANTES, eotaxin, lymphotactin, IP10, 1-309, ENA78, GCP-2, NAP-2, and/or MGSA/gro.

[0354] In some embodiments, the exogenous polypeptide comprising a cytokine on the engineered erythroid cell or enucleated cell serves as a polypeptide for stimulating Signal 3. It will be understood that in some embodiments, the engineered erythroid cells or enucleated cells of the disclosure can expand and/or activate T cells by stimulating all three signals involved in T cell development. Signal 1 involves TCR, and can be stimulated with antigens that signal through TCR. Signal 2 can be mediated by several different molecules, including any immune co-stimulatory molecules described herein, such as 4-1BBL. Signal 3 can be transduced via cytokines, such as IL-15. Without being bound by theory, it is thought that the presence of signal 3, for example from a third exogenous polypeptide on the engineered erythroid cell or enucleated cell, in addition to signals 1 and 2, from a first and second exogenous polypeptide, respectively, e.g., an antigen and costimulatory polypeptide as described herein, increases the capacity of the engineered erythroid cells or enucleated cells to boost the memory T cell population and thereby provide longer efficacy, e.g., efficacy against a relapse of a tumor or re-challenge with an infectious agent. In some embodiments, the polypeptide for stimulating Signal 3 is an exogenous polypeptide comprising IL-15, or a fragment thereof. In some embodiments, the engineered erythroid cell or enucleated cell comprises a third exogenous polypeptide that stimulates Signal 3 (e.g., IL-15 or a fragment thereof).

[0355] In some embodiments, an engineered erythroid cell or enucleated cell , comprises one or more (e.g., 2, 3, 4, 5, or more) exogenous polypeptides comprising a cytokine receptor subunits from Table 14 or cytokine-binding variants or fragments thereof. In some embodiments, an engineered erythroid cell or enucleated cell comprises two or three (e.g., all) cytokine receptor subunits from a single row of Table 14 or cytokine-binding variants or functional fragments thereof. The exogenous polypeptide comprising a cytokine receptor can be present on the surface of the engineered erythroid cell or enucleated cell. The expressed receptors typically have the wild type human receptor sequence or a variant or fragment thereof that is able to bind and sequester its target ligand. In some embodiments, two or more exogenous polypeptides comprising a cytokine receptor subunit are linked to each other, e.g., as a fusion protein.

[0356] In some embodiments, the one or more exogenous polypeptides comprising a cytokine, a chemokine, or a cytokine receptor subunit include or are fused to a transmembrane domain. In some embodiments, the transmembrane domain is selected from a sequence set forth in Table 14. In some embodiments, the one or more exogenous polyepeptides comprising a cytokine, a chemokine, or a cytokine receptor subunit include or are fused to a leader sequence. In some embodiments, the leader sequence is selected from a sequence set forth in Table 14.

[0357] In some embodiments, the erythroid cell further comprises a targeting moiety, e.g., an address moiety or targeting moiety described in International Publication No. WO 2007/030708, e.g., at pages 34-45 therein, which application is herein incorporated by reference in its entirety.

TABLE 14
Cytokines and Receptors

| Name | Cytokine Receptor(s)(Da) and Form |
|---|---|
| Interleukins | |
| IL-1-like | |
| IL-1α | CD121a, CDw121b |
| IL-1β | CD121a, CDw121b |
| IL-1RA | CD121a |
| IL-18 | IL-18Rα, β |
| Common g chain (CD132) | |
| IL-2 | CD25, 122, 132 |
| IL-4 | CD124, 213a13, 132 |
| IL-7 | CD127, 132 |
| IL-9 | IL-9R, CD132 |
| IL-13 | CD213a1, 213a2, |
| IL-15 | IL-15Ra, CD122, 132 |
| IL-21 | IL21R |
| Common b chain (CD131) | |
| IL-3 | CD123, CDw131 |
| IL-5 | CDw125, 131 |
| Also related | |
| GM-CSF | CD116, CDw131 |
| IL-6-like | |
| IL-6 | CD126, 130 |
| IL-11 | IL-11Ra, CD130 |
| Also related | |
| G-CSF | CD114 |
| IL-12 | CD212 |
| IL-35 | IL35R |
| LIF | LIFR, CD130 |
| OSM | OSMR, CD130 |
| IL-10-like | |
| IL-10 | CDw210 |
| IL-20 | IL-20Rα, β |
| Others | |
| IL-14 | IL-14R |
| IL-16 | CD4 |
| IL-17 | CDw217 |
| Interferons | |
| IFN-α | CD118 |
| IFN-β | CD118 |
| IFN-γ | CDw119 |
| TNF | |
| CD154 | CD40 |
| LT-β | LTβR |
| TNF-α | CD120a, b |
| TNF-β (LT-α) | CD120a, b |
| 4-1BBL | CD137 (4-1BB) |
| APRIL | BCMA, TACI |
| CD70 | CD27 |
| CD153 | CD30 |
| CD178 | CD95 (Fas) |
| GITRL | GITR |
| LIGHT | LTbR, HVEM |
| OX40L | OX40 |
| TALL-1 | BCMA, TACI |
| TRAIL | TRAILR1-4 |
| TWEAK | Apo3 |
| TRANCE | RANK, OPG |
| TGF-β | |
| TGF-β1 | TGF-βR1 |
| TGF-β2 | TGF-βR2 |
| TGF-β3 | TGF-βR3 |
| Miscellaneous hematopoietins | |
| Epo | EpoR |
| Tpo | TpoR |
| Flt-3L | Flt-3 |
| SCF | CD117 |
| M-CSF | CD115 |
| MSP | CDw136 |

### Engineered Erythroid Cells Including Wild-Type or Loadable Exogenous Antigen-Presenting Polypeptides

[0358] The present disclosure features engineered erythroid cells (e.g., engineered enucleated erythroid cells) or enucleated cells (e.g., modified enucleated cells) that include a wild-type or loadable antigen-presenting polypeptide and additional polypeptide(s) of interest, as described herein (e.g., an exogenous antigenic polypeptide or an exogenous displaceable polypeptide). In some embodiments, an enucleated cell is a cell that lacks a nucleus (e.g., due to a differentiation process such as erythropoiesis). In some embodiments, an enucleated cell is incapable of expressing a polypeptide. In some embodiments, an enucleated cell is an erythrocyte, a reticulocyte, or a platelet. Engineered erythroid cells (e.g., engineered enucleated erythroid cells) or enucleated cells (e.g., modified enucleated cells) may be advantageously used for the treatment of, for example, cancer, autoimmune diseases, or infectious diseases.

[0359] In some aspects, the present disclosure provides an engineered erythroid cell or enucleated cell, engineered to activate T cells, wherein the cell presents, e.g. comprises on the cell surface, an exogenous loadable antigen-presenting polypeptide comprising one or more amino acid substitutions which stabilize the loadable exogenous antigen-presenting polypeptide on the cell surface.

[0360] In some embodiments, the wild-type or loadable antigen-presenting polypeptide is bound to an exogenous antigenic polypeptide disclosed in Tables 7-8 or an exogenous displaceable polypeptide disclosed herein.

[0361] In some embodiments, the engineered erythroid cell (e.g., engineered enucleated erythroid cell) or enucleated cell (e.g., modified enucleated cell) comprises a first exogenous polypeptide. In some embodiments, the engineered erythroid cell (e.g., engineered enucleated erythroid cell) or enucleated cell (e.g., modified enucleated cell) further comprises a second, different, exogenous polypeptide. The engineered erythroid cell (e.g., engineered enucleated erythroid cell) or enucleated cell (e.g., modified enucleated cell) optionally further comprises second and third, different, exogenous polypeptides. The engineered erythroid cell (e.g., engineered enucleated erythroid cell) or enucleated cell (e.g., modified enucleated cell) optionally further comprises second, third and fourth, different, exogenous polypeptides. The engineered erythroid cell (e.g., engineered enucleated erythroid cell) or enucleated cell (e.g., modified enucleated cell) optionally further comprises second, third, fourth and fifth, different, exogenous polypeptides. In some embodiments, the engineered erythroid cell (e.g., engineered enucleated erythroid cell) or enucleated cell (e.g., modified enucleated cell) optionally further comprises 1, 2, 3, 4, 5, 6, 7, 8, 9, 10, 11, 12, 13, 14, 15, 16, 17, 18, 19, 20 or more different, exogenous polypeptides. In some embodiments, the engineered erythroid cell (e.g., engineered enucleated erythroid cell) or enucleated cell (e.g., modified enucleated cell) optionally further comprises between 1-100, 1-200 different, exogenous polypeptides.

[0362] An exogenous antigenic polypeptide can be presented by the wild-type or loadable exogenous antigen-presenting polypeptide, i.e., the loadable exogenous antigen-presenting polypeptide is loaded with or bound to the exogenous antigen polypeptide. Thus, in some aspects, the present disclosure provides an engineered erythroid cell or enucleated cell that presents (e.g., comprises on the cell surface) a loaded exogenous antigen-presenting polypeptide including an exogenous antigenic polypeptide. In other embodiments, the loadable exogenous antigen-presenting polypeptide is bound to an exogenous displaceable polypeptide, as described herein, which can be displaced and replaced by an exogenous antigenic polypeptide.

[0363] In other aspects, the present disclosure provides an engineered erythroid cell (e.g., engineered enucleated erythroid cell) or enucleated cell (e.g., modified enucleated cell), wherein the cell includes a wild-type or loadable exogenous antigen-presenting polypeptide, with or without an exogenous displaceable polypeptide, and also comprises one or more of an exogenous antigenic polypeptide, an exogenous coinhibitory polypeptide, an exogenous costimulatory polypeptide, and/or an exogenous polypeptide comprising a cytokine, a chemokine or a cytokine receptor subunit.

### Circulation Time

[0364] In some embodiments, the engineered erythroid cell or enucleated cell (e.g., enucleated erythroid cell) of the present disclosure resides in circulation after administration to a subject for at least about 1 day to about 240 days (e.g., for at least about 1 day, 2 days, 3 days, 4 day, 5 days, 6 days, 7 days, 8 days, 9 days, 10 days, 11 days, 11 days, 12 days, 13 days, 14 days, 15 days, 16 days, 17 days, 18 days, 19 days, 20 days, 21 days, 22 days, 23 days, 24 days, 25 days, 26 days, 27 days, 28 days, 29 days, 30 days, 31 days, 32 days, 33 days, 34 days, 35 days, 36 days, 37 days, 38 days, 39 days, 40 days, 41 days, 42 days, 43 days, 44 days, 45 days, 46 days, 47 days, 48 days, 49 days, 50 days, 51 days, 52 days, 53 days, 54 days, 55 days, 56 days, 57 days, 58 days, 59 days, 60 days, 61 days, 62 days, 63 days, 64 days, 65 days, 66 days, 67 days, 68 days, 69 days, 70 days, 71 days, 72 days, 73 days, 74 days, 75 days, 76 days, 77 days, 78 days, 79 days, 80 days, 81 days, 82 days, 83 days, 84 days, 85 days, 86 days, 87 days, 88 days, 89 days, 90 days, 91 days, 92 days, 93 days, 94 days, 95 days, 96 days, 97 days, 98 days, 99 days, 100 days, 101 days, 102 days, 103 days, 104 days, 105 days, 106 days, 107 days, 108 days, 109 days, 110 days, 111 days, 112 days, 113 days, 114 days, 115 days, 116 days, 117 days, 118 days, 119 days, 120 days, 121 days, 122 days, 123 days, 124 days, 125 days, 126 days, 127 days, 128 days, 129 days, 130 days, 131 days, 132 days, 133 days, 134 days, 135 days, 136 days, 137 days, 138 days, 139 days, 140 days, 141 days, 142 days, 143 days, 144 days, 145 days, 146 days, 147 days, 148 days, 149 days, 150 days, 151 days, 152 days, 153 days, 154 days, 155 days, 156 days, 157 days, 158 days, 159 days, 160 days, 161 days, 162 days, 163 days, 164 days, 165 days, 166 days, 167 days, 168 days, 169 days, 170 days, 171 days, 172 days, 173 days, 174 days, 175 days, 176 days, 177 days, 178 days, 179 days, 180 days, 181 days, 182 days, 183 days, 184 days, 185 days, 186 days, 187 days, 188 days, 189 days, 190 days, 191 days, 192 days, 193 days, 194 days, 195 days, 196 days, 197 days, 198 days, 199 days, 200 days, 201 days, 202 days, 203 days, 204 days, 205 days, 206 days, 207 days, 208 days, 209 days, 210 days, 211 days, 212 days, 213 days, 214 days, 215 days, 216 days, 217 days, 218 days, 219 days, 220 days, 221 days, 222 days, 223 days, 224 days, 225 days, 226 days, 227 days, 228 days, 229 days, 230 days, 231 days, 232 days, 233 days, 234 days, 235 days, 236 days, 237 days, 238 days, 239 days, or 240 days.

### Copy Number

[0365] In some embodiments, one or more exogenous polypeptides (e.g., exogenous antigenic polypeptide, exogenous antigen-presenting polypeptides, exogenous costimulatory polypeptides, and exogenous coinhibitory polypeptides) have an abundance ratio of about 1:1, from about 2:1 to 1:2, from about 5:1 to 1:5, from about 10:1 to 1:10, from about 20:1 to 1:20, from about 50:1 to 1:50, from about 100:1 to 1:100 by weight or by copy number.

[0366] In some embodiments, the engineered erythroid cell (e.g., engineered enucleated erythroid cell) or enucleated cell (e.g., modified enucleated cell) comprises at least at least 10 copies, 100 copies, 1,000 copies, 5,000 copies 10,000 copies, 25,000 copies, 50,000 copies, or 100,000 copies of each of a first exogenous polypeptide and a second exogenous polypeptide. In some embodiments, the copy number of a first exogenous polypeptide is no more than 10%, 20%, 30%, 40%, 50%, 60%, 70%, 80%, or 90% greater, or no more than 2, 5, 10, 20, 50, 100, 200, 500, or 1000 times greater than the copy number of a second exogenous polypeptide. In some embodiments, the copy number of a second exogenous polypeptide is no more than 10%, 20%, 30%, 40%, 50%, 60%, 70%, 80%, or 90% greater, or no more than 2, 5, 10, 20, 50, 100, 200, 500, or 1000 times greater than the copy number of a first exogenous polypeptide.

[0367] In some embodiments, the first exogenous polypeptide comprises between about 50,000 to about 600,000 copies of a first exogenous polypeptide, for example about 50,000, 60,000, 60,000, 80,000, 90,000, 100,000, 110,000, 120,000, 130,000, 140,000, 150,000, 155,000, 160,000, 165,000, 170,000, 175,000, 180,000, 185,000, 190,000, 195,000, 200,000, 205,000, 210,000, 215,000, 220,000, 225,000, 230,000, 235,000, 240,000, 245,000, 250,000, 255,000, 260,000, 265,000, 270,000, 275,000, 280,000, 285,000, 290,000, 295,000, 300,000, 305,000, 310,000, 315,000, 320,000, 325,000, 330,000, 335,000, 340,000, 345,000, 350,000, 355,000, 360,000, 365,000, 370,000, 375,000, 380,000, 385,000, 390,000, 395,000, 400,000, 450,000, 500,000, 550,000, 600,000 copies of a first exogenous polypeptide. In some embodiments, the engineered erythroid cell or enucleated cell comprises between about 50,000-600,000, between about 100,000-600,000, between about 100,000-500,000, between about 100,000-400,000, between about 100,000-150,000, between about 150,000-300,000, or between 150,000-200,000 copies of a first exogenous polypeptide. In some embodiments, the engineered erythroid cell or enucleated cell comprises at least about 75,000 copies, about 100,000 copies, about 125,000 copies, about 150,000 copies, about 175,000 copies, about 200,000 copies, about 250,000 copies, about 300,000 copies about 400,000, or about 500,000 copies of a first exogenous polypeptide. In some embodiments, the engineered erythroid cell or enucleated cell comprises between about 50,000 to about 600,000 copies of a second exogenous polypeptide, for example about 50,000, 60,000, 60,000, 80,000, 90,000, 100,000, 110,000, 120,000, 130,000, 140,000, 150,000, 155,000, 160,000, 165,000, 170,000, 175,000, 180,000, 185,000, 190,000, 195,000, 200,000, 205,000, 210,000, 215,000, 220,000, 225,000, 230,000, 235,000, 240,000, 245,000, 250,000, 255,000, 260,000, 265,000, 270,000, 275,000, 280,000, 285,000, 290,000, 295,000, 300,000, 305,000, 310,000, 315,000, 320,000, 325,000, 330,000, 335,000, 340,000, 345,000, 350,000, 355,000, 360,000, 365,000, 370,000, 375,000, 380,000, 385,000, 390,000, 395,000, 400,000, 450,000, 500,000, 550,000, 600,000 copies of the second polypeptide. In some embodiments, the engineered erythroid cell comprises between about 50,000-600,000, between about 100,000-600,000, between about 100,000-500,000, between about 100,000-400,000, between about 100,000-150,000, between about 150,000-300,000, or between 150,000-200,000 copies of a second exogenous polypeptide. In some embodiments, the engineered erythroid cell comprises at least about 75,000 copies about 100,000 copies, about 125,000 copies, about 150,000 copies, about 175,000 copies, about 200,000 copies, about 250,000 copies, about 300,000 copies about 400,000, or about 500,000 copies of a second exogenous polypeptide.

### Populations of Engineered Erythroid Cells

[0368] In one aspect, the disclosure features populations of the engineered erythroid cells or enucleated cells described herein e.g., a plurality or population of the engineered enucleated erythroid cells. The terms “plurality” and “population” are used interchangeably herein. In some embodiments, a population of engineered erythroid cells or enucleated cells may comprise predominantly enucleated cells (e.g., greater than 70%), predominantly nucleated cells (e.g., greater than 70%), or any mixture of enucleated and nucleated cells. In some embodiments, a population of engineered erythroid cells or enucleated cells may comprise reticulocytes, erythrocytes, or a mixture of reticulocytes and erythrocytes. In some embodiments, a population of engineered erythroid cells or enucleated cells may predominantly comprise reticulocytes. In some embodiments, a population of engineered erythroid cells or enucleated cells may predominantly comprise erythrocytes (e.g., immature or mature erythrocytes).

[0369] In some embodiments, a population of engineered erythroid cells consists essentially of enucleated cells. In some embodiments, a population of engineered erythroid cells comprises predominantly or substantially enucleated cells. For example, in some embodiments, a population of engineered erythroid cells comprises at least about 70% or more enucleated cells. In some embodiments, the population provided herein comprises at least about 70%, about 71%, about 72%, about 73%, about 74%, about 75%, about 76%, about 77%, about 78%, about 79%, about 80%, about 81%, about 82%, about 83%, about 84%, about 85%, about 86%, about 87%, about 88%, about 89%, about 90%, about 91%, about 92%, about 93%, about 94%, about 95%, about 96%, about 97%, about 98%, about 99, or about 100% enucleated cells. In some embodiments, the population provided herein comprises greater than about 70% enucleated cells. In some embodiments, the population of engineered erythroid cells comprises greater than about 70%, about 71%, about 72%, about 73%, about 74%, about 75%, about 76%, about 77%, about 78%, about 79%, about 80%, about 81%, about 82%, about 83%, about 84%, about 85%, about 86%, about 87%, about 88%, about 89%, about 90%, about 91%, about 92%, about 93%, about 94%, about 95%, about 96%, about 97%, about 98%, or about 99% enucleated cells. In some embodiments, the population of engineered erythroid cells comprises between about 80% and about 100% enucleated cells, for example between about 80% and about 95%, about 80% and about 90%, about 80% and about 85%, about 85% and about 100%, about 85% and about 95%, about 85% and about 90%, about 90% and about 100%, about 90% and about 95%, or about 95% and about 100% of enucleated cells.

[0370] In some embodiments, the population of engineered erythroid cells comprises less than about 30% nucleated cells. For example, in embodiments, the population of engineered erythroid cells comprises less than about 1%, about 2%, about 3%, about 5%, about 6%, about 7%, about 8%, about 9%, about 10%, about 11%, about 12%, about 13%, about 14%, about 15%, about 16%, about 17%, about 18%, about 19%, about 20%, about 21%, about 22%, about 23%, about 24%, about 25%, about 26%, about 27%, about 28%, about 29%, or less than about 30% nucleated cells. In some embodiments, the population of engineered erythroid cells comprises less than about 1%, about 2%, about 3%, about 4%, about 5%, about 6%, about 7%, about 8%, about 9%, about 10%, about 11%, about 12%, about 13%, about 14%, about 15%, about 16%, about 17%, about 18%, or about 19%, about 21%, about 22%, about 23%, about 24%, about 25%, about 26%, about 27%, about 28%, about 29%, or about 30% nucleated cells. In some embodiments, the population of engineered erythroid cells comprises between 0% and 30% nucleated cells. In some embodiments, the populations of engineered erythroid cells comprise between about 0% and 20% nucleated cells, for example between about 0% and 19%, between about 0% and 15%, between about 0% and 10%, between about 0% and 5%, between about 0% and 4%, between about 0% and 3%, between about 0% and 2% nucleated cells, or between about 5% and 20%, between about 10% and 20%, or between about 15% and 20% nucleated cells.

[0371] In some embodiments, the disclosure features a population of the engineered erythroid cells as described herein, wherein the population of engineered erythroid cells comprises less than 30% nucleated cells and at least 70% enucleated cells, or comprises less than 20% nucleated cells and at least 80% enucleated cells, or comprises less than 15% nucleated cells and at least 85% nucleated cells, or comprises less than 10% nucleated cells and at least 90% enucleated cells, or comprises less than 5% nucleated cells and at least 95% enucleated cells. In some embodiments, the disclosure features populations of the engineered erythroid cells as described herein, wherein the population of engineered erythroid cells comprises about 0% nucleated cells and about 100% enucleated cells, about 1% nucleated cells and about 99% enucleated cells, about 2% nucleated cells and about 98% enucleated cells, about 3% nucleated cells and about 97% enucleated cells, about 4% nucleated cells and about 96% enucleated cells, about 5% nucleated cells and about 95% enucleated cells, about 6% nucleated cells and about 94% enucleated cells, about 7% nucleated cells and about 93% enucleated cells, about 8% nucleated cells and about 92% enucleated cells, about 9% nucleated cells and about 91% enucleated cells, about 10% nucleated cells and about 90% enucleated cells, about 11% nucleated cells and about 89% enucleated cells, about 12% nucleated cells and about 88% enucleated cells, about 13% nucleated cells and about 87% enucleated cells, about 14% nucleated cells and about 86% enucleated cells, about 85% nucleated cells and about 85% enucleated cells, about 16% nucleated cells and about 84% enucleated cells, about 17% nucleated cells and about 83% enucleated cells, about 18% nucleated cells and about 82% enucleated cells, about 19% nucleated cells and about 81% enucleated cells, or about 20% nucleated cells and about 80% enucleated cells.

[0372] In other embodiments, the engineered erythroid cell population comprises predominantly or substantially nucleated cells. In some embodiments, the engineered erythroid cell population consists essentially of nucleated cells. In various embodiments, the nucleated cells in the engineered erythroid cell population are erythroid precursor cells. In some embodiments, the erythroid precursor cells are selected from the group consisting of pluripotent hematopoietic stem cells (HSCs), multipotent myeloid progenitor cells, CFU-S cells, BFU-E cells, CFU-E cells, pronormoblasts, basophilic normoblasts, polychromatophilic normoblasts and orthochromatophilic normoblasts.

[0373] In certain embodiments, the population of engineered erythroid cells comprises at least about 10%, at least about 20%, at least about 30%, at least about 40%, at least about 50%, at least about 60%, at least about 70%, at least about 75%, at least about 80%, at least about 85%, at least about 90%, at least about 95%, at least about 98%, at least about 99% or 100% nucleated cells.

[0374] It will be understood that during the preparation of the engineered erythroid cells or enucleated cells of the as described herein, some fraction of cells may not include an exogenous polypeptide (e.g., due to lack of expression or transduction or conjugation with an exogenous nucleic acid). Accordingly, in some embodiments, a population of engineered erythroid cells or enucleated cells provided herein comprises a mixture of engineered erythroid cells and unmodified erythroid cells, or a mixture of modified enucleated cells and unmodified enucleate cells, i.e., some fraction of cells in the population will not include (e.g., express) an exogenous polypeptide. For example, a population of engineered erythroid cells or enucleated cells can comprise, in various embodiments, at least about 10%, 20%, 30%, 40%, 50%, 60%, 70%, 80%, 90%, 91%, 92%, 93%, 94%, 95%, 96%, 97%, 98% or 99% erythroid cells or enucleated cells that include an exogenous polypeptide, wherein the remaining erythroid cells or enucleated cells in the population are do not include an exogenous polypeptide. In some embodiments, a single unit dose of engineered erythroid cells (e.g., engineered enucleated erythroid cells) or enucleated cells comprises at least about 10%, 20%, 30%, 40%, 50%, 60%, 65%, 70%, 75%, 80%, 85%, 90%, 91%, 92%, 93%, 94%, 95%, 96%, 97%, 98% or 99% erythroid cells or enucleated cells including an exogenous polypeptide, wherein the remaining erythroid cells or enucleated cells in the dose do not include an exogenous polypeptide.

### II. Methods of Making Engineered Erythroid Cells or Enucleated Cells

[0375] Various methods of making engineered erythroid cells (e.g., engineered enucleated erythroid cells) or enucleated cells (e.g., modified enucleated cells) are contemplated by the present disclosure. In some aspects, the present disclosure features a method of making an engineered erythroid cell or enucleated cell, wherein the cell comprises an engineered erythroid cell or enucleated cell that includes an exogenous immunogenic polypeptide and, in some embodiments, an exogenous antigenic polypeptide.

[0376] In some embodiments, the description provides a method of producing the engineered erythroid cell or enucleated cell comprising a loadable exogenous antigen-presenting polypeptide on the cell surface, the method comprising introducing an exogenous nucleic acid encoding the loadable exogenous antigen-presenting polypeptide into a nucleated erythroid precursor cell, wherein the loadable exogenous antigen-presenting polypeptide comprises one or more amino acid substitutions which stabilize the loadable exogenous antigen-presenting polypeptide on the cell surface; culturing the nucleated erythroid precursor cell under conditions suitable for enucleation and production of the loadable exogenous antigen-presenting polypeptide, thereby making an engineered enucleated erythroid cell comprising a loadable exogenous antigen-presenting polypeptide on the cell surface, thereby making the engineered erythroid cell (e.g., engineered enucleated erythroid cell) or enucleated cell (e.g., modified enucleated cell). In some embodiments, the method further comprises introducing at least one (e.g., one, two, or three) exogenous nucleic acid encoding at least one (e.g., one, two, or three) exogenous antigenic polypeptide into the erythroid precursor cell. In some embodiments, the at least one exogenous antigenic polypeptide comprises a transmembrane domain and optionally a linker. In some embodiments, the method further comprises introducing an exogenous nucleic acid encoding an exogenous displaceable polypeptide into the erythroid precursor cell.

[0377] The present disclosure further provides a method of contacting the engineered erythroid cell (e.g., engineered enucleated erythroid cell) or enucleated cell (e.g., modified enucleated cell) with at least one exogenous antigenic polypeptide, wherein the at least one exogenous antigenic polypeptide specifically binds to the wild-type or loadable exogenous antigen-presenting polypeptide which is present on the cell surface of the engineered enucleated erythroid cell. In some embodiments, the exogenous antigenic polypeptide is conjugated (e.g., covalently) to the wild-type or loadable exogenous antigen-presenting polypeptide.

[0378] In some embodiments, the method comprises contacting the engineered erythroid cell (e.g., engineered enucleated erythroid cell) or enucleated cell (e.g., modified enucleated cell) with multiple different (e.g., two, three, four, five or more) exogenous antigenic polypeptides, wherein the multiple different (e.g., two, three, four, five or more) exogenous antigenic polypeptides specifically bind to the wild-type or loadable exogenous antigen-presenting polypeptide which is present on the cell surface of the engineered enucleated erythroid cell. In some embodiments, the enucleated erythroid cell (e.g., engineered enucleated erythroid cell) or enucleated cell (e.g., modified enucleated cell) is contacted with two or more exogenous antigenic polypeptides, wherein the two or more exogenous antigenic polypeptides specifically bind to the wild-type or loadable exogenous antigen-presenting polypeptide. In some embodiments, the enucleated erythroid cell (e.g., engineered enucleated erythroid cell) or enucleated cell (e.g., modified enucleated cell) is contacted with three or more exogenous antigenic polypeptides, wherein the three or more exogenous antigenic polypeptides specifically bind to the wild-type or loadable exogenous antigen-presenting polypeptide. In some embodiments, the enucleated erythroid cell (e.g., engineered enucleated erythroid cell) or enucleated cell (e.g., modified enucleated cell) is contacted with four or more exogenous antigenic polypeptides, wherein the four or more exogenous antigenic polypeptides specifically bind to the wild-type or loadable exogenous antigen-presenting polypeptide. In some embodiments, the enucleated erythroid cell (e.g., engineered enucleated erythroid cell) or enucleated cell (e.g., modified enucleated cell) is contacted with five or more exogenous antigenic polypeptides, wherein the five or more exogenous antigenic polypeptides specifically bind to the wild-type or loadable exogenous antigen-presenting polypeptide. In some embodiments, the wild-type or loadable exogenous antigen-presenting polypeptide comprises an MEW class I polypeptide. In some embodiments, the wild-type or loadable exogenous antigen-presenting polypeptide comprises an MEW class II polypeptide.

[0379] In some embodiments, the exogenous nucleic acid further encodes an exogenous displaceable polypeptide. In other embodiments, the exogenous nucleic acid further encodes a linker. In other embodiments, the exogenous nucleic acid further encodes a transmembrane domain. In some embodiments, the exogenous wild-type or loadable antigen-presenting polypeptide, transmembrane domain, linker and exogenous displaceable polypeptide are comprised in a single chain fusion protein. In some embodiments, the single chain fusion protein comprises a linker disposed between the wild-type or loadable exogenous antigen-presenting polypeptide and the exogenous displaceable polypeptide.

[0380] In some embodiments, the methods described herein further comprise displacing the displaceable exogenous polypeptide from the loadable exogenous antigen-presenting polypeptide by contacting the engineered enucleated erythroid cell in vitro with an exogenous antigenic polypeptide, wherein the loadable exogenous antigen-presenting polypeptide has a higher affinity for the exogenous antigenic polypeptide than for an exogenous displaceable polypeptide.

[0381] In some embodiments, the exogenous nucleic acid comprises DNA or RNA. In some embodiments, the introducing step comprises viral transduction. In some embodiments, the introducing step comprises electroporation. In some embodiments, the introducing step comprises utilizing one or more of: liposome mediated transfer, adenovirus, adeno-associated virus, herpes virus, a retroviral based vector, lipofection, and a lentiviral vector.

[0382] In some embodiments, the engineered erythroid cell (e.g., engineered enucleated erythroid cell) or enucleated cell (e.g., modified enucleated cell) further comprises an additional exogenous polypeptide, include, for example, an exogenous coinhibitory polypeptide, a costimulatory polypeptide, a cytokine, or a membrane anchor polypeptide.

[0383] Methods of making an engineered erythroid cell (e.g., engineered enucleated erythroid cell) or enucleated cell (e.g., modified enucleated cell) are described herein, however it is to be understood that these methods are non-limiting.

[0384] The processes of making the engineered erythroid cells and enucleated cells are described in more detail below.

### Methods of Manufacturing Enucleated Erythroid Cells

[0385] Methods of manufacturing enucleated erythroid cells comprising an exogenous agent (e.g., a polypeptide) are described, e.g., in International Application Publication Nos. WO2015/073587 and WO2015/153102, each of which is incorporated by reference in its entirety.

[0386] In some embodiments, hematopoietic progenitor cells, e.g., CD34⁺ hematopoietic progenitor cells (e.g., human (e.g., adult human) or mouse cells), are contacted with a nucleic acid or nucleic acids encoding one or more exogenous polypeptides, and the cells are allowed to expand and differentiate in culture. In some embodiments, the CD34⁺ cells are immortalized, e.g., comprise a human papilloma virus (HPV; e.g., HPV type 16) E6 and/or E7 genes. In some embodiments, the immortalized CD34⁺ hematopoietic progenitor cell is a BEL-A cell line cell (see Trakarnasanga et al. (2017) Nat. Commun. 8: 14750). Additional immortalized CD34⁺ hematopoietic progenitor cells are described in U.S. Pat. Nos. 9,951,350, and 8,975,072. In some embodiments, an immortalized CD34⁺ hematopoietic progenitor cell is contacted with a nucleic acid or nucleic acids encoding one or more exogenous polypeptides, and the cells are allowed to expand and differentiate in culture.

[0387] In some embodiments, the erythroid cells described herein are made by a method comprising contacting a nucleated erythroid cell (e.g., an erythroid precursor cell) with an exogenous nucleic acid. In some embodiments, the exogenous nucleic acid is codon-optimized. For instance, the exogenous nucleic acid may comprise one or more codons that differ from the wild-type codons in a way that does not change the amino acid encoded by that codon, but that increases translation of the nucleic acid, e.g., by using a codon preferred by the host cell, e.g., a mammalian cell, e.g., an erythroid cell.

[0388] The exogenous nucleic acid may be, e.g., DNA or RNA (e.g., mRNA). A number of viruses may be used as gene transfer vehicles including retroviruses, Moloney murine leukemia virus (MMLV), adenovirus, adeno-associated virus (AAV), herpes simplex virus (HSV), lentiviruses such as human immunodeficiency virus 1 (HIV 1), and spumaviruses such as foamy viruses, for example.

[0389] In some embodiments, the exogenous nucleic acid is operatively linked to a constitutive promoter. In some embodiments, a constitutive promoter is used to drive expression of the targeting moiety.

[0390] In some embodiments, the exogenous nucleic acid is operatively linked to an inducible or repressible promoter, e.g., to drive expression of the exogenous polypeptide. For instance, the promoter may be doxycycline-inducible, e.g., a P-TRE3GS promoter or active fragment or variant thereof. Examples of inducible promoters include, but are not limited, to a metallothionine-inducible promoter, a glucocorticoid-inducible promoter, a progesterone-inducible promoter, and a tetracycline-inducible promoter (which may also be doxycycline-inducible). In some embodiments, the inducer is added to culture media comprising cells that comprise the inducible promoter, e.g., at a specific stage of cell differentiation. In some embodiments, the inducer (e.g., doxycycline) is added at an amount of about 1-5, 2-4, or 3 μg/mL. In some embodiments, a repressor is withdrawn from to culture media comprising cells that comprise the repressible promoter, e.g., at a specific stage of cell differentiation. In some embodiments, the inducer is added, or the repressor is withdrawn, during maturation phase, e.g., between days 1-10, 2-9, 3-8, 4-6, or about day 5 of maturation phase. In some embodiments, the inducer is present, or the repressor is absent, between day 1, 2, 3, 4, 5, 6, 7,8, 9 or 10 of maturation and enucleation. In some embodiments, the inducer is present, or the repressor is absent, for at least 1, 2, 3, 4, 5, 6, 7, 8, 9, or 10 days. In some embodiments, the inducer is present, or the repressor is absent, from maturation day 5 to the end of differentiation. In some embodiments, the inducer is present, or the repressor is absent at maturation day 9. In some embodiments, the inducer is added, or the repressor is withdrawn, when the population of erythroid cells comprises a plurality of normoblasts (e.g., basophilic, polychromatic, or orthochromatic normoblasts or a combination thereof), e.g., when 10-20%, 20-30%, 30-40%, 40-50%, 50-60%, 60-70%, or 70-80% of the cells in the population are normoblasts. In some embodiments, the inducer is added, or the repressor is withdrawn, when the population of erythroid cells comprises a plurality of pro-erythroblasts, e.g., when 10-20%, 20-30%, 30-40%, 40-50%, 50-60%, 60-70%, or 70-80% of the cells in the population are pro-erythroblasts. In some embodiments, the inducer is added, or the repressor is withdrawn, when the population of erythroid cells comprises a plurality of erythroblasts at terminal differentiation e.g., when 10-20%, 20-30%, 30-40%, 40-50%, 50-60%, 60-70%, or 70-80% of the cells in the population are erythroblasts at terminal differentiation. In some embodiments, the erythroid cell or population of erythroid cells comprises an additional exogenous protein, e.g., a transactivator, e.g., a Tet-inducible transactivator (e.g., a Tet-on-3G transactivator).

[0391] In some embodiments, the inducer is added, or the repressor is withdrawn, when the population of erythroid cells comprises one or more of (e.g., all of) endogenous GPA, band 3, or alpha4 integrin. In some embodiments, the inducer is added, or the repressor is withdrawn, during a time when about 84-100%, 85-100%, 90-100%, or 95-100% of the cells in the population are GPA-positive (e.g., when the population first reaches that level); during a time when 50-100%, 60-100%, 70-100%, 80-100%, 90-100%, 95-100%, or 98-100% of the cells in the population are band 3-positive (e.g., when the population first reaches that level); and/or during a time when about 70-100%, 80-90%, or about 85% of the cells in the population are alpha4 integrin-positive (e.g., when the population first reaches that level).

[0392] GPA, band 3, and alpha4 integrin can be detected, e.g., by a flow cytometry assay, e.g., a flow cytometry assay of Example 10 of International Application Publication No. WO2018/009838, incorporated herein by reference.

[0393] In some embodiments, the cells are produced using conjugation, e.g., sortagging or sortase-mediated conjugation, e.g., as described in International Application Publication Nos. WO2014/183071 or WO2014/183066, each of which is incorporated by reference in its entirety. In some embodiments, the cells are made by a method that does not comprise sortase-mediated conjunction.

[0394] In some embodiments, the cells are made by a method that does not comprise hypotonic loading. In some embodiments, the cells are made by a method that does not comprise a hypotonic dialysis step. In some embodiments, the cells are made by a method that does not comprise controlled cell deformation.

[0395] In some embodiments, the erythroid cells are expanded at least 1000, 2000, 5000, 10,000, 20,000, 50,000, or 100,000 fold (and optionally up to 100,000, 200,000, or 500,000 fold). The number of cells is measured, in some embodiments, using an automated cell counter. In some embodiments, the population of erythroid cells comprises at least about 30%, 35%, 40%, 45%, 50%, 55%, 60%, 65%, 70%, 75%, 80%, 85%, 90%, 95%, 96% or 98% (and optionally up to about 80, 90, or 100%) enucleated erythroid cells. In some embodiments, the population of erythroid cells comprises 70%-100%, 75%-100%, 80%-100%, 85%-100%, or 90%-100% enucleated cells. In some embodiments, the population of erythroid cells contains less than 1% live nucleated cells, e.g., contains no detectable live nucleated cells. Enucleation is measured, in some embodiments, by FACS using a nuclear stain. In some embodiments, at least about 30%, 35%, 40%, 45%, 50%, 55%, 60%, 65%, 70%, 75%, 80%, 85%, 90%, 95%, 96% or 98% (and optionally up to about 70, 80, 90, or 100%) of erythroid cells in the population comprise one or more (e.g., 2, 3, 4 or more) of the exogenous polypeptides. Level of the polypeptides is measured, in some embodiments, by erythroid cells using labeled antibodies against the polypeptides. In some embodiments, at least about 30%, 35%, 40%, 45%, 50%, 55%, 60%, 65%, 70%, 75%, 80%, 85%, 90%, 95%, 96% or 98% (and optionally up to about 70, 80, 90, or 100%) of erythroid cells in the population are enucleated and comprise one or more (e.g., 2, 3, 4, or more) of the exogenous polypeptides. In some embodiments, the population of erythroid cells comprises about 1×10⁹-2×10⁹, 2×10⁹-5×10⁹, 5×10⁹-1×10¹⁰, 1×10¹⁰, 2×10¹⁰, 2×10¹⁰-5×10¹⁰, 5×10¹⁰-1×10¹¹, 1×10¹¹-2×10¹¹, 2×10¹¹-5×10¹¹, 5×10¹¹-1×10¹², 1×10¹²-2×10¹², 2×10¹²-5×10¹², or 5×10¹²-1×10¹³ cells.

### Physical Characteristics of Engineered Erythroid Cells

[0396] In some embodiments, the engineered erythroid cells (e.g., engineered enucleated erythroid cells) or enucleated cells (e.g., modified enucleated cells) described herein have one or more (e.g., 2, 3, 4, or more) physical characteristics described herein, e.g., osmotic fragility, cell size, hemoglobin concentration, or phosphatidylserine content. While not wishing to be bound by theory, in some embodiments, an engineered erythroid cell, (e.g., an engineered enucleated erythroid cell) or an enucleated cell (e.g., modified enucleated cell), that includes an exogenous polypeptide described herein has physical characteristics that resemble a wild-type, untreated erythroid cell or enucleated cell. In contrast, a hypotonically-loaded erythroid cell may sometimes display aberrant physical characteristics such as increased osmotic fragility, altered cell size, reduced hemoglobin concentration, or increased phosphatidylserine levels on the outer leaflet of the cell membrane.

[0397] Osmotic Fragility

[0398] In some embodiments, the engineered erythroid cell or enucleated cell exhibits substantially the same osmotic membrane fragility as an isolated, uncultured erythroid cell that does not comprise an exogenous polypeptide. In some embodiments, the population of engineered erythroid cells or enucleated cells has an osmotic fragility of less than 50% cell lysis at 0.3%, 0.35%, 0.4%, 0.45%, or 0.5% NaCl. Osmotic fragility can be assayed using the method of Example 59 of WO2015/073587, which is herein incorporated by reference in its entirety.

[0399] Cell Size

[0400] In some embodiments, the engineered erythroid cell (e.g., engineered enucleated erythroid cell) or enucleated cell (e.g., modified enucleated cell) has approximately the diameter or volume as a wild-type, untreated enucleated erythroid cell.

[0401] In some embodiments, the population of engineered erythroid cells (e.g., engineered enucleated erythroid cells) or enucleated cells (e.g., modified enucleated cells) has an average diameter of about 4, 5, 6, 7, or 8 microns, and optionally the standard deviation of the population is less than 1, 2, or 3 microns. In some embodiments, the one or more engineered erythroid cell (e.g., engineered enucleated erythroid cell) or enucleated cell (e.g., modified enucleated cell) has a diameter of about 4-8, 5-7, or about 6 microns. In some embodiments, the diameter of the erythroid cell is less than about 1 micron, larger than about 20 microns, between about 1 micron and about 20 microns, between about 2 microns and about 20 microns, between about 3 microns and about 20 microns, between about 4 microns and about 20 microns, between about 5 microns and about 20 microns, between about 6 microns and about 20 microns, between about 5 microns and about 15 microns or between about 10 microns and about 30 microns. Cell diameter is measured, in some embodiments, using an Advia 120 hematology system.

[0402] In some embodiment the volume of the mean corpuscular volume of the erythroid cells is greater than 10 fL, 20 fL, 30 fL, 40 fL, 50 fL, 60 fL, 70 fL, 80 fL, 90 fL, 100 fL, 110 fL, 120 fL, 130 fL, 140 fL, 150 fL, or greater than 150 fL. In some embodiments, the mean corpuscular volume of the erythroid cells is less than 30 fL, 40 fL, 50 fL, 60 fL, 70 fL, 80 fL, 90 fL, 100 fL, 110 fL, 120 fL, 130 fL, 140 fL, 150 fL, 160 fL, 170 fL, 180 fL, 190 fL, 200 fL, or less than 200 fL. In some embodiments, the mean corpuscular volume of the erythroid cells is between 80-100, 100-200, 200-300, 300-400, or 400-500 femtoliters (fL). In some embodiments, a population of engineered erythroid cells (e.g., engineered enucleated erythroid cells) or enucleated cells (e.g., modified enucleated cells) has a mean corpuscular volume set out in this paragraph and the standard deviation of the population is less than 50, 40, 30, 20, 10, 5, or 2 fL. The mean corpuscular volume is measured, in some embodiments, using a hematological analysis instrument, e.g., a Coulter counter.

[0403] Hemoglobin Concentration

[0404] In some embodiments, the engineered erythroid cell (e.g., engineered enucleated erythroid cell) or enucleated cell (e.g., modified enucleated cell) has a hemoglobin content similar to a wild-type, untreated enucleated erythroid cell or enucleated cell. In some embodiments, the engineered erythroid cells (e.g., engineered enucleated erythroid cells) or enucleated cells (e.g., modified enucleated cells) comprise at least about 20, 22, 24, 26, 28, or 30 pg, and optionally up to about 30 pg, of total hemoglobin. Hemoglobin levels are determined, in some embodiments, using the Drabkin's reagent method of Example 33 of International Application Publication No. WO2015/073587, which is herein incorporated by reference in its entirety.

[0405] Phosphatidylserine Content

[0406] In some embodiments, the engineered erythroid cells (e.g., engineered enucleated erythroid cells) or enucleated cells (e.g., modified enucleated cells), has approximately the same phosphatidylserine content on the outer leaflet of its cell membrane as a wild-type, untreated erythroid cell or enucleated cell. Phosphatidylserine is predominantly on the inner leaflet of the cell membrane of wild-type, untreated erythroid cells, and hypotonic loading can cause the phosphatidylserine to distribute to the outer leaflet where it can trigger an immune response. In some embodiments, the population of engineered erythroid cells (e.g., engineered enucleated erythroid cells) or enucleated cells (e.g., modified enucleated cells) comprises less than about 30, 25, 20, 15, 10, 9, 8, 6, 5, 4, 3, 2, or 1% of cells that are positive for annexin V staining. Phosphatidylserine exposure is assessed, in some embodiments, by staining for annexin-V-FITC, which binds preferentially to PS, and measuring FITC fluorescence by flow cytometry, e.g., using the method of Example 54 of International Application Publication Nos. WO2015/073587, which is herein incorporated by reference in its entirety.

[0407] Other Characteristics

[0408] In some embodiments, an engineered erythroid cell (e.g., engineered enucleated erythroid cell) or an enucleated cell, or a population of engineered erythroid cells or enucleated cells comprises one or more of (e.g., all of) endogenous GPA (C235a), transferrin receptor (CD71), Band 3 (CD233), or integrin alpha4 (C49d). These proteins can be measured, e.g., as described in Example 10 of International Application Publication No. WO2018/009838, which is herein incorporated by reference in its entirety. The percentage of GPA-positive cells and Band 3-positive cells typically increases during maturation of an erythroid cell, and the percentage of integrin alpha4-positive typically remains high throughout maturation.

[0409] In some embodiments, the population of engineered erythroid cells or enucleated cells comprises at least about 50%, 60%, 61%, 62%, 63%, 64%, 65%, 66%, 67%, 68%, 69%, 70%, 71%, 72%, 73%, 74%, 75%, 76%, 77%, 78%, 79%, 80%, 81%, 82%, 83%, 84%, 85%, 86%, 87%, 88%, 89%, 90%, 91%, 92%, 93%, 94%, 95%, 96%, 97%, 98%, 99%, or 100% GPA+(i.e., CD235a⁺) cells. In some embodiments, the population of engineered erythroid cells or enucleated cells comprises between about 50% and about 100% (e.g., from about 60% and about 100%, from about 65% and about 100%, from about 70% and about 100%, from about 75% to about 100%, from about 80% to about 100%, from about 85% to about 100%, from about 90% to about 100%, from about 95% to about 100%, from about 75% to about 99%, from about 80% to about 99%, from about 85% to about 99%, from about 90% to about 99%, from about 95% to about 99%, from about 75% to about 95%, from about 80% to about 95%, from about 85% to about 95%, from about 90% to about 95%, from about 95% to about 98%) GPA⁺ cells. The presence of GPA is detected, in some embodiments, using FACS.

[0410] In some embodiments, the population of engineered erythroid cells or enucleated cells comprises at least about 50%, 60%, 61%, 62%, 63%, 64%, 65%, 66%, 67%, 68%, 69%, 70%, 71%, 72%, 73%, 74%, 75%, 76%, 77%, 78%, 79%, 80%, 81%, 82%, 83%, 84%, 85%, 86%, 87%, 88%, 89%, 90%, 91%, 92%, 93%, 94%, 95%, 96%, 97%, 98%, 99%, or 100% CD71⁺ cells. In some embodiments, the population of engineered erythroid cells or enucleated cells comprises between about 70% and about 100% (e.g., from about 75% to about 100%, from about 80% to about 100%, from about 85% to about 100%, from about 90% to about 100%, from about 95% to about 100%, from about 75% to about 99%, from about 80% to about 99%, from about 85% to about 99%, from about 90% to about 99%, from about 95% to about 99%, from about 75% to about 95%, from about 80% to about 95%, from about 85% to about 95%, from about 90% to about 95%, from about 95% to about 98%) CD71⁺ cells. The presence of CD71 (transferrin receptor) is detected, in some embodiments, using FACS.

[0411] In some embodiments, the population of engineered erythroid cells or enucleated cells comprises at least about 50%, 60%, 61%, 62%, 63%, 64%, 65%, 66%, 67%, 68%, 69%, 70%, 71%, 72%, 73%, 74%, 75%, 76%, 77%, 78%, 79%, 80%, 81%, 82%, 83%, 84%, 85%, 86%, 87%, 88%, 89%, 90%, 91%, 92%, 93%, 94%, 95%, 96%, 97%, 98%, 99%, or 100% CD233³⁰ cells. In some embodiments, the population of engineered erythroid cells or enucleated cells comprises between about 70% and about 100% (e.g., from about 75% to about 100%, from about 80% to about 100%, from about 85% to about 100%, from about 90% to about 100%, from about 95% to about 100%, from about 75% to about 99%, from about 80% to about 99%, from about 85% to about 99%, from about 90% to about 99%, from about 95% to about 99%, from about 75% to about 95%, from about 80% to about 95%, from about 85% to about 95%, from about 90% to about 95%, from about 95% to about 98%) CD233⁺ cells. The presence of CD233 (Band 3) is detected, in some embodiments, using FACS.

[0412] In some embodiments, the population of engineered erythroid cells or enucleated cells comprises at least about 50%, 60%, 61%, 62%, 63%, 64%, 65%, 66%, 67%, 68%, 69%, 70%, 71%, 72%, 73%, 74%, 75%, 76%, 77%, 78%, 79%, 80%, 81%, 82%, 83%, 84%, 85%, 86%, 8′7%, 88%, 89%, 90%, 91%, 92%, 93%, 94%, 95%, 96%, 97%, 98%, 99%, or 100% CD47⁺ cells. In some embodiments, the population of engineered erythroid cells or enucleated cells comprises between about 70% and about 100% (e.g., from about 75% to about 100%, from about 80% to about 100%, from about 85% to about 100%, from about 90% to about 100%, from about 95% to about 100%, from about 75% to about 99%, from about 80% to about 99%, from about 85% to about 99%, from about 90% to about 99%, from about 95% to about 99%, from about 75% to about 95%, from about 80% to about 95%, from about 85% to about 95%, from about 90% to about 95%, from about 95% to about 98%) CD47⁺ cells. The presence of CD47 (integrin associate protein) is detected, in some embodiments, using FACS.

[0413] In some embodiments, the population of engineered erythroid cells or enucleated cells comprises at least about 50%, 60%, 61%, 62%, 63%, 64%, 65%, 66%, 67%, 68%, 69%, 70%, 71%, 72%, 73%, 74%, 75%, 76%, 77%, 78%, 79%, 80%, 81%, 82%, 83%, 84%, 85%, 86%, 87%, 88%, 89%, 90%, 91%, 92%, 93%, 94%, 95%, 96%, 97%, 98%, 99%, or 100% CD36⁺ (CD36-negative) cells. In some embodiments, the population of engineered erythroid cells or enucleated cells comprises between about 70% and about 100% (e.g., from about 75% to about 100%, from about 80% to about 100%, from about 85% to about 100%, from about 90% to about 100%, from about 95% to about 100%, from about 75% to about 99%, from about 80% to about 99%, from about 85% to about 99%, from about 90% to about 99%, from about 95% to about 99%, from about 75% to about 95%, from about 80% to about 95%, from about 85% to about 95%, from about 90% to about 95%, from about 95% to about 98%) CD36⁻ (CD36-negative) cells. The presence of CD36 is detected, in some embodiments, using FACS.

[0414] In some embodiments, the population of engineered erythroid cells or enucleated cells comprises at least about 50%, 60%, 61%, 62%, 63%, 64%, 65%, 66%, 67%, 68%, 69%, 70%, 71%, 72%, 73%, 74%, 75%, 76%, 77%, 78%, 79%, 80%, 81%, 82%, 83%, 84%, 85%, 86%, 87%, 88%, 89%, 90%, 91%, 92%, 93%, 94%, 95%, 96%, 97%, 98%, 99%, or 100% CD34⁻ (CD34-negative) cells. In some embodiments, the population of engineered erythroid cells or enucleated cells comprises between about 70% and about 100% (e.g., from about 75% to about 100%, from about 80% to about 100%, from about 85% to about 100%, from about 90% to about 100%, from about 95% to about 100%, from about 75% to about 99%, from about 80% to about 99%, from about 85% to about 99%, from about 90% to about 99%, from about 95% to about 99%, from about 75% to about 95%, from about 80% to about 95%, from about 85% to about 95%, from about 90% to about 95%, from about 95% to about 98%) CD34⁻ (CD34-negative) cells. The presence of CD34 is detected, in some embodiments, using FACS.

[0415] In some embodiments, the population of engineered erythroid cells or enucleated cells comprises at least about 50%, 60%, 61%, 62%, 63%, 64%, 65%, 66%, 67%, 68%, 69%, 70%, 71%, 72%, 73%, 74%, 75%, 76%, 77%, 78%, 79%, 80%, 81%, 82%, 83%, 84%, 85%, 86%, 87%, 88%, 89%, 90%, 91%, 92%, 93%, 94%, 95%, 96%, 97%, 98%, 99%, or 100% CD235a⁺/CD47⁺/CD233⁺ cells. In some embodiments, the population of engineered erythroid cells or enucleated cells comprises between about 70% and about 100% (e.g., from about 75% to about 100%, from about 80% to about 100%, from about 85% to about 100%, from about 90% to about 100%, from about 95% to about 100%, from about 75% to about 99%, from about 80% to about 99%, from about 85% to about 99%, from about 90% to about 99%, from about 95% to about 99%, from about 75% to about 95%, from about 80% to about 95%, from about 85% to about 95%, from about 90% to about 95%, from about 95% to about 98%) CD235a⁺/CD47⁺/CD233⁺ cells.

[0416] In some embodiments, the population of engineered erythroid cells or enucleated cells comprises at least about 50%, 60%, 61%, 62%, 63%, 64%, 65%, 66%, 67%, 68%, 69%, 70%, 71%, 72%, 73%, 74%, 75%, 76%, 77%, 78%, 79%, 80%, 81%, 82%, 83%, 84%, 85%, 86%, 87%, 88%, 89%, 90%, 91%, 92%, 93%, 94%, 95%, 96%, 97%, 98%, 99%, or 100% CD235a⁺/CD47⁺/CD233⁺/CD34⁻/CD36⁻ cells. In some embodiments, the population of engineered erythroid cells or enucleated cells comprises between about 70% and about 100% (e.g., from about 75% to about 100%, from about 80% to about 100%, from about 85% to about 100%, from about 90% to about 100%, from about 95% to about 100%, from about 75% to about 99%, from about 80% to about 99%, from about 85% to about 99%, from about 90% to about 99%, from about 95% to about 99%, from about 75% to about 95%, from about 80% to about 95%, from about 85% to about 95%, from about 90% to about 95%, from about 95% to about 98%) CD235a⁺/CD47⁺/CD233⁺/CD34⁻/CD36⁻0 cells.

[0417] In some embodiments, a population of engineered erythroid cells or enucleated cells comprising erythroid cells comprises less than about 10%, 9%, 8%, 7%, 6%, 5%, 4%, 3%, 2%, or 1% echinocytes. In some embodiments, a population of engineered erythroid cells or enucleated cells comprising comprises less than about 10%, 9%, 8%, 7%, 6%, 5%, 4%, 3%, 2%, or 1% pyrenocytes.

### Universal Donor Erythroid Cells

[0418] In some embodiments, erythroid cells or enucleated cells described herein are autologous and/or allogeneic to the subject to which the cells will be administered. For example, erythroid cells allogeneic to the subject include one or more of blood type specific erythroid cells (e.g., the cells can be of the same blood type as the subject) or one or more universal donor erythroid cells. In some embodiments, the enucleated erythroid cells described herein have reduced immunogenicity compared to a reference cell, e.g., have lowered levels of one or more blood group antigens.

[0419] Where allogeneic cells are used for transfusion, a compatible ABO blood group can be chosen to prevent an acute intravascular hemolytic transfusion reaction. The ABO blood types are defined based on the presence or absence of the blood type antigens A and B, monosaccharide carbohydrate structures that are found at the termini of oligosaccharide chains associated with glycoproteins and glycolipids on the surface of the erythrocytes (reviewed in Liu et al. (2007) Nat. Biotech. 25: 454-64). Because group 0 erythrocytes contain neither A nor B antigens, they can be safely transfused into recipients of any ABO blood group, e.g., group A, B, AB, or O recipients. Group O erythrocytes are considered universal and may be used in all blood transfusions. Thus, in some embodiments, an erythroid cell described herein is type O. In contrast, group A erythroid cells may be given to group A and AB recipients, group B erythroid cells may be given to group B and AB recipients, and group AB erythroid cells may be given to AB recipients.

[0420] In some instances, it may be beneficial to convert a non-group O erythroid cell to a universal blood type. Enzymatic removal of the immunodominant monosaccharides on the surface of group A and group B erythrocytes may be used to generate a population of group O-like erythroid cells (See, e.g., Liu et al. (2007)). Group B erythroid cells may be converted using an a-galactosidase from green coffee beans. Alternatively or in addition, α-N-acetylgalactosaminidase and a-galactosidase enzymatic activities from E. meningosepticum bacteria may be used to respectively remove the immunodominant A and B antigens (Liu et al. (2007)), if present on the erythroid cells. In one example, packed erythroid cells isolated as described herein, are incubated in 200 mM glycine (pH 6.8) and 3 mM NaCl in the presence of either a-N-acetylgalactosaminidase and a-galactosidase (about 300 μg/ml packed erythroid cells) for 60 min at 26° C. After treatment, the erythroid cells are washed by 3-4 rinses in saline with centrifugation and ABO-typed according to standard blood banking techniques.

[0421] While the ABO blood group system is the most important in transfusion and transplantation, in some embodiments it can be useful to match other blood groups between the erythroid cells to be administered and the recipient, or to select or make erythroid cells that are universal for one or more other (e.g., minor) blood groups. A second blood group is the Rh system, wherein an individual can be Rh+or Rh-. Thus, in some embodiments, an erythroid cell described herein is Rh-. In some embodiments, the erythroid cell is Type O and Rh-.

[0422] In some embodiments, an erythroid cell described herein is negative for one or more minor blood group antigens, e.g., Le(a-b-) (for Lewis antigen system), Fy(a-b-) (for Duffy system), Jk(a-b-) (for Kidd system), M-N- (for MNS system), K-k- (for Kell system), Lu(a-b-) (for Lutheran system), and H-antigen negative (Bombay phenotype), or any combination thereof. In some embodiments, the erythroid cell is also Type O and/or Rh-. Minor blood groups are described, e.g., in Agarwal et al. (2013) Blood Res. 48(1): 51-4 and Mitra et al. (2014) Indian J Anaesth. 58(5): 524-8, each of which is incorporated herein by reference in its entirety.

### Isolating Erythrocytes

[0423] Mature erythrocytes may be isolated using various methods such as, for example, a cell washer, a continuous flow cell separator, density gradient separation, fluorescence-activated cell sorting (FACS), Miltenyi immunomagnetic depletion (MACS), or a combination of these methods (See, e.g., van der Berg et al. (1987) Clin. Chem. 33: 1081-2; Bar-Zvi et al. (1987) J. Biol. Chem. 262: 17719-23; Goodman et al. (2007) Exp. Biol. Med. 232: 1470-6).

[0424] Erythrocytes may be isolated from whole blood by simple centrifugation (see, e.g., van der Berg et al. (1987)). For example, EDTA-anticoagulated whole blood may be centrifuged at 800×g for 10 min at 4° C. The platelet-rich plasma and buffy coat are removed and the red blood cells are washed three times with isotonic saline solution (NaCl, 9 g/L).

[0425] Alternatively, erythrocytes may be isolated using density gradient centrifugation with various separation mediums such as, for example, Ficoll, Hypaque, Histopaque, Percoll, Sigmacell, or combinations thereof. For example, a volume of Histopaque-1077 is layered on top of an equal volume of Histopaque-1119. EDTA-anticoagulated whole blood diluted 1:1 in an equal volume of isotonic saline solution (NaCl, 9 g/L) is layered on top of the Histopaque and the sample is centrifuged at 700×g for 30 min at room temperature. Under these conditions, granulocytes migrate to the 1077/1119 interface, lymphocytes, other mononuclear cells and platelets remain at the plasma/1077 interface, and the red blood cells are pelleted. The red blood cells are washed twice with isotonic saline solution.

[0426] Alternatively, erythrocytes may be isolated by centrifugation using a Percoll step gradient (See, e.g., Bar-Zvi et al. (1987)). For example, fresh blood is mixed with an anticoagulant solution containing 75 mM sodium citrate and 38 mM citric acid and the cells washed briefly in HEPES-buffered saline. Leukocytes and platelets are removed by adsorption with a mixture of α-cellulose and Sigmacell (1:1). The erythrocytes are further isolated from reticulocytes and residual white blood cells by centrifugation through a 45/75% Percoll step gradient for 10 min at 2500 rpm in a Sorvall SS34 rotor. The erythrocytes are recovered in the pellet while reticulocytes band at the 45/75% interface and the remaining white blood cells band at the 0/45% interface. The Percoll is removed from the erythrocytes by several washes in Hepes-buffered saline. Other materials that may be used to generate density gradients for isolation of erythrocytes include OPTIPREP, a 60% solution of iodixanol in water (from Axis-Shield, Dundee, Scotland).

[0427] Erythrocytes may be separated from reticulocytes, for example, using flow cytometry (See, e.g., Goodman et al. (2007)). In this instance, whole blood is centrifuged (550×g, 20 min, 25° C.) to separate cells from plasma. The cell pellet is resuspended in phosphate buffered saline solution and further fractionated on Ficoll-Paque (1.077 density), for example, by centrifugation (400×g, 30 min, 25° C.) to separate the erythrocytes from the white blood cells. The resulting cell pellet is resuspended in RPMI supplemented with 10% fetal bovine serum and sorted on a FACS instrument such as, for example, a Becton Dickinson FACSCalibur (BD Biosciences, Franklin Lakes, N.J., USA) based on size and granularity.

[0428] Erythrocytes may be isolated by immunomagnetic depletion (See, e.g., Goodman et al. (2007)). In this instance, magnetic beads with cell-type specific antibodies are used to eliminate non-erythrocytes. For example, erythrocytes are isolated from the majority of other blood components using a density gradient as described herein followed by immunomagnetic depletion of any residual reticulocytes. The cells are pre-treated with human antibody serum for 20 min at 25° C. and then treated with antibodies against reticulocyte specific antigens such as, for example, CD71 and CD36. The antibodies may be directly attached to magnetic beads or conjugated to PE, for example, to which magnetic beads with anti-PE antibody will react. The antibody-magnetic bead complex is able to selectively extract residual reticulocytes, for example, from the erythrocyte population.

[0429] Erythrocytes may also be isolated using apheresis. The process of apheresis involves removal of whole blood from a subject or donor, separation of blood components using centrifugation or cell sorting, withdrawal of one or more of the separated portions, and transfusion of remaining components back into the subject or donor. A number of instruments are currently in use for this purpose such as for example the Amicus and Alyx instruments from Baxter (Deerfield, Ill., USA), the Trima Accel instrument from Gambro BCT (Lakewood, Colo., USA), and the MCS+9000 instrument from Haemonetics (Braintree, Mass., USA). Additional purification methods may be necessary to achieve the appropriate degree of cell purity.

[0430] Reticulocytes are immature red blood cells and compose approximately 1% of the red blood cells in the human body. Reticulocytes develop and mature in the bone marrow. Once released into circulation, reticulocytes rapidly undergo terminal differentiation to mature erythrocytes. Like mature erythrocytes, reticulocytes do not have a cell nucleus. Unlike mature erythrocytes, reticulocytes maintain the ability to perform protein synthesis. In some embodiments, the engineered erythroid cell comprises an enucleated reticulocyte.

[0431] Reticulocytes of varying age may be isolated from peripheral blood based on the differences in cell density as the reticulocytes mature. Reticulocytes may be isolated from peripheral blood using differential centrifugation through various density gradients. For example, Percoll gradients may be used to isolate reticulocytes (See, e.g., Noble el al., Blood 74:475-481 (1989)). Sterile isotonic Percoll solutions of density 1.096 and 1.058 g/ml are made by diluting Percoll (Sigma-Aldrich, Saint Louis, Mo., USA) to a final concentration of 10 mM triethanolamine, 117 mM NaCl, 5 mM glucose, and 1.5 mg/ml bovine serum albumin (BSA). These solutions have an osmolarity between 295 and 310 mOsm. Five milliliters, for example, of the first Percoll solution (density 1.096) is added to a sterile 15 ml conical centrifuge tube. Two milliliters, for example, of the second Percoll solution (density 1.058) is layered over the higher density first Percoll solution. Two to four milliliters of whole blood are layered on top of the tube. The tube is centrifuged at 250xg for 30 min in a refrigerated centrifuge with swing-out tube holders. Reticulocytes and some white cells migrate to the interface between the two Percoll layers. The cells at the interface are transferred to a new tube and washed twice with phosphate buffered saline (PBS) with 5 mM glucose, 0.03 mM sodium azide and 1 mg/ml BSA. Residual white blood cells are removed by chromatography in PBS over a size exclusion column.

[0432] Alternatively, reticulocytes may be isolated by positive selection using an immunomagnetic separation approach (See, e.g., Brun et al. (1990) Blood 76: 2397-403). This approach takes advantage of the large number of transferrin receptors that are expressed on the surface of reticulocytes relative to erythrocytes prior to maturation. Magnetic beads coated with an antibody to the transferrin receptor may be used to selectively isolate reticulocytes from a mixed blood cell population. Antibodies to the transferrin receptor of a variety of mammalian species, including human, are available from commercial sources (e.g., Affinity BioReagents, Golden, Colo., USA; Sigma-Aldrich, Saint Louis, Mo., USA). The transferrin antibody may be directly linked to the magnetic beads. Alternatively, the transferrin antibody may be indirectly linked to the magnetic beads via a secondary antibody. For example, mouse monoclonal antibody 10D2 (Affinity BioReagents, Golden, Colo., USA) against human transferrin may be mixed with immunomagnetic beads coated with a sheep anti-mouse immunoglobulin G (Dynal/Invitrogen, Carlsbad, Calif., USA). The immunomagnetic beads are then incubated with a leukocyte-depleted red blood cell fraction. The beads and red blood cells are incubated at 22° C. with gentle mixing for 60-90 min followed by isolation of the beads with attached reticulocytes using a magnetic field. The isolated reticulocytes may be removed from the magnetic beads using, for example, DETACHaBEAD solution (from Invitrogen, Carlsbad, Calif., USA). Alternatively, reticulocytes may be isolated from in vitro growth and maturation of CD34+ hematopoietic stem cells using the methods described herein.

[0433] Terminally-differentiated enucleated erythrocytes can be separated from other cells based on their DNA content. In a non-limiting example, cells are first labeled with a vital DNA dye, such as Hoechst 33342 (Invitrogen Corp.). Hoechst 33342 is a cell-permeant nuclear counterstain that emits blue fluorescence when bound to double-stranded DNA. Undifferentiated precursor cells, macrophages or other nucleated cells in the culture are stained by Hoechst 33342, while enucleated erythrocytes are Hoechst-negative. The Hoechst-positive cells can be separated from enucleated erythrocytes by using fluorescence activated cell sorters or other cell sorting techniques. The Hoechst dye can be removed from the isolated erythrocytes by dialysis or other suitable methods.

[0434] Vehicles for Polypeptides Described Herein

[0435] While in many embodiments herein, the one or more (e.g., two or more) exogenous polypeptides are situated on or in an erythroid cell (e.g., engineered enucleated erythroid cell) or enucleated cell (e.g., modified enucleated cell), it is understood that any polypeptide or combination of exogenous polypeptides described herein can also be situated on or in another vehicle. The vehicle can comprise, e.g., a cell, an erythroid cell, a corpuscle, a nanoparticle, a micelle, a liposome, or an exosome. For instance, in some aspects, the present disclosure provides a vehicle (e.g., a cell, an erythroid cell, a corpuscle, a nanoparticle, a micelle, a liposome, or an exosome) comprising, e.g., on its surface, one or more agents described herein. In some embodiments, the one or more agents comprise an agent selected from the exogenous polypeptides described herein, or a fragment or variant thereof. In some embodiments, the vehicle comprises two or more agents described herein, e.g., any pair of agents described herein.

[0436] In some embodiments, the vehicle comprises an engineered erythroid cell (e.g. an engineered enucleated erythroid cell) or an enucleated cell.

### Heterogeneous Populations of Cells

[0437] While in many embodiments herein, the one or more (e.g., two or more) exogenous polypeptides are situated on or in a single cell, it is understood that any polypeptide or combination of polypeptides described herein can also be situated on a plurality of cells. For instance, in some aspects, the disclosure provides a plurality of erythroid cells or enucleated cells, wherein a first cell of the plurality comprises a first exogenous polypeptide (e.g., comprising a first exogenous antigenic polypeptide, exogenous antigen-presenting polypeptide, exogenous costimulatory polypeptide, exogenous coinhibitory polypeptide, cytokine, and exogenous Treg costimulatory polypeptide, or a combination thereof) and a second cell of the plurality comprises a second exogenous polypeptide (e.g., comprising a second exogenous antigenic polypeptide, exogenous antigen-presenting polypeptide, exogenous costimulatory polypeptide, exogenous coinhibitory polypeptide, cytokine, and exogenous Treg costimulatory polypeptide, or a combination thereof). In some embodiments, the plurality of cells comprises two or more polypeptides described herein, e.g., any pair of polypeptides described herein. In some embodiments, less than 90%, 80%, 70%, 60%, 50%, 40%, 30%, 20%, 10%, 5%, 2%, or 1% of the cells in the plurality comprise both the first exogenous polypeptide and the second exogenous polypeptide.

[0438] Cells Encapsulated in a Membrane

[0439] In some embodiments, engineered erythroid cells (e.g. engineered enucleated erythroid cells) or enucleated cells (e.g., modified enucleated cells), or other vehicles described herein are encapsulated in a membrane, e.g., semi-permeable membrane. In some embodiments, the membrane comprises a polysaccharide, e.g., an anionic polysaccharide alginate. In some embodiments, the semipermeable membrane does not allow cells to pass through, but allows passage of small molecules or macromolecules, e.g., metabolites, proteins, or DNA. In some embodiments, the membrane is one described in Lienert et al. (2014) Nat. Rev. Mol. Cell Biol. 15: 95-107, incorporated herein by reference in its entirety.

### Erythrocyte Precursor Cells

[0440] Provided herein are engineered erythrocyte precursor cells, and methods of making the engineered erythrocyte precursor cells.

[0441] Pluripotent stem cells can give rise to erythrocytes by the process of erythropoiesis. The stem cell looks like a small lymphocyte and lacks the functional capabilities of the erythrocyte. The stem cells have the capacity of infinite division, something the mature cells lack. Some of the daughter cells arising from the stem cell acquire erythroid characters over generations and time. Most of the erythroid cells in the bone marrow have a distinct morphology but commitment to erythroid maturation is seen even in cells that have not acquired morphological features distinctive of the erythroid lineage. These cells are recognized by the type of colonies they form in vitro. Two such cells are recognized. Burst-forming unit erythroid (BFU-E) arise from the stem cell and gives rise to colony-forming unit erythroid (CFU-E). CFU-E gives rise to pronormoblast, the most immature of erythroid cells with a distinct morphology. BFU-E and CFU-E form a very small fraction of bone marrow cells. Morphologically five erythroid precursors are identifiable in the bone marrow stained with Romanovsky stains. The five stages from the most immature to the most mature are the proerythroblast, the basophilic normoblast (early erythroblast), polychromatophilic normoblast (intermediate erythroblast), orthochromatophilic normoblast (late erythroblast) and reticulocyte. BFU-E (burst forming unit-erythroid), CFU-E (erythroid colony-forming unit), pronormoblast (proerythroblast), basophilic normoblast, polychromatophilic normoblast and orthochromatophilic normoblast are lineage restricted.

[0442] Table 15 below summarizes the morphological features of erythrocyte precursor cells.

TABLE 15

| Cell | Nucleus |
|---|---|
| Hematopoietic stem cell (HSC) | Yes |
| CMP (Common myeloid progenitor) | Yes |
| CFU-S (spleen colony forming cell; | Yes; Can differentiate into |
| myeloid precursor cell) | erythrocytes, platelets, |
| | macrophages. |
| BFU-E (burst forming unit-erythroid) | Yes |
| CFU-E (erythroid colony-forming | Yes |
| unit) | |
| Pronormoblast (proerythroblast) | Yes; fine chromatin, many nucleoli |
| Basophilic Normoblast | Yes; granular chromatin, no |
| | nucleoli |
| Polychromatophilic Normoblast | Yes; chromatin is visibly clumped |
| | with dark staining areas |
| Orthochromatophilic normoblast | Yes; featureless nucleus with dense |
| | chromatin |

[0443] Normal human erythrocytes express CD36, an adhesion molecule of monocytes, platelets, and endothelial cells (van Schravendijk et al. (1992) Blood 80(8): 2105-14). Accordingly, in some embodiments, an anti-CD36 antibody can be used to identify human erythrocytes.

[0444] Any type of cell known in the art that is capable of differentiating into an erythrocyte, i.e., any erythrocyte precursor cell, can be modified in accordance with the methods described herein to produce engineered erythrocyte precursor cells. In certain embodiments, the erythrocyte precursor cells modified in accordance with the methods described herein are cells that are in the process of differentiating into an erythrocyte, i.e., the cells are of a type known to exist during mammalian erythropoiesis. For example, the cells may be pluripotent hematopoietic stem cells (HSCs) or CD34+ cells, multipotent myeloid progenitor cells, CFU-S cells, BFU-E cells, CFU-E cells, pronormoblasts (proerythroblast), basophilic normoblasts, polychromatophilic normoblasts, or orthochromatophilic normoblasts. The modified erythrocyte precursor cells provided herein can be differentiated into engineered enucleated erythroid cells (e.g., reticulocytes or erythrocytes) in vitro using methods known in the art, i.e., using molecules known to promote erythropoiesis, e.g., SCF, Erythropoietin, IL-3, and/or GM-CSF, described herein below. Alternatively, the modified erythrocyte precursor cells are provided in a composition as described herein, and are capable of differentiating into erythrocytes upon administration to a subject in vivo.

### Culturing

[0445] Sources for generating engineered erythroid cells described herein include circulating erythroid cells. A suitable cell source may be isolated from a subject as described herein from subject-derived hematopoietic or erythroid precursor cells, derived from immortalized erythroid cell lines, or derived from induced pluripotent stem cells, optionally cultured and differentiated. Methods for generating erythrocytes using cell culture techniques are well known in the art, e.g., Giarratana et al. (2011) Blood 118: 5071-9, Huang et al. (2014), and Kurita et al. (2013) PLOS One 8: e59890. Protocols vary according to growth factors, starting cell lines, culture period, and morphological traits by which the resulting cells are characterized. Culture systems have also been established for blood production that may substitute for donor transfusions (Fibach et al. (1989) Blood 73: 100-3).

[0446] Provided herein are culturing methods for erythroid cells and engineered erythroid cells. Erythroid cells can be cultured from hematopoietic progenitor cells, including, for example, CD34+ hematopoietic progenitor cells (Giarratana et al. (2011)), induced pluripotent stem cells (Kurita et al. (2013)), and embryonic stem cells (Hirose et al. (2013) Stem Cell Reports 1: 499-508). Cocktails of growth and differentiation factors that are suitable to expand and differentiate progenitor cells are known in the art. Examples of suitable expansion and differentiation factors include, but are not limited to, stem cell factor (SCF), an interleukin (IL) such as IL-1, IL-2, IL-3, IL-4, IL-5, IL-6, IL-7, IL-8, IL-9, IL-11, IL-12, CSF, G-CSF, thrombopoietin (TPO), GM-CSF, erythropoietin (EPO), Flt3, Flt2, PIXY 321, and leukemia inhibitory factor (LIF).

[0447] Erythroid cells can be cultured from hematopoietic progenitors, such as CD34⁺ cells, by contacting the progenitor cells with defined factors in a multi-step culture process. For example, in some embodiments, erythroid cells can be cultured from hematopoietic progenitors in a three-step process, outlined below.

[0448] The first step may comprise contacting the cells in culture with stem cell factor (SCF) at 1-1000 ng/mL, erythropoietin (EPO) at 1-100 U/mL, and interleukin-3 (IL-3) at 0.1-100 ng/mL.

[0449] The first step optionally comprises contacting the cells in culture with a ligand that binds and activates a nuclear hormone receptor, such as e.g., the glucocorticoid receptor, the estrogen receptor, the progesterone receptor, the androgen receptor, or the pregnane x receptor. The ligands for these receptors include, for example, a corticosteroid, such as, e.g., dexamethasone at 10 nM-100 μM or hydrocortisone at 10 nM-100 μM; an estrogen, such as, e.g., beta-estradiol at 10 nM-100 μM; a progestogen, such as, e.g., progesterone at 10 nM-100 μM, hydroxyprogesterone at 10 nM-100 μM, 5a-dihydroprogesterone at 10 nM-100 μM, 11-deoxycorticosterone at 10 nM-100 μM, or a synthetic progestin, such as, e.g., chlormadinone acetate at 10 nM-100 μM; an androgen, such as, e.g., testosterone at 10 nM-100 μM, dihydrotestosterone at 10 nM-100 μM or androstenedione at 10 nM-100 μM; or a pregnane x receptor ligand, such as, e.g., rifampicin at 10 nM-100 μM, hyperforin at 10 nM-100 St. John's Wort (hypericin) at 10 nM-100 μM, or vitamin E-like molecules, such as, e.g., tocopherol at 10 nM-100. The first step may also optionally comprise contacting the cells in culture with an insulin-like molecule, such as, e.g., insulin at 1-50 μg/mL, insulin-like growth factor 1 (IGF-1) at 1-50 μg/mL, insulin-like growth factor 2 (IGF-2) at 1-50 μg/mL, or mechano-growth factor at 1-50 μg/mL. The first step further may optionally comprise contacting the cells in culture with transferrin at 0.1-5 mg/mL.

[0450] The first step may optionally comprise contacting the cells in culture with one or more interleukins (IL) or growth factors such as, e.g., IL-1, IL-2, IL-4, IL-5, IL-6, IL-7, IL-8, IL-9, IL-11, IL-12, granulocyte colony-stimulating factor (G-CSF), macrophage colony-stimulating factor (M-CSF), granulocyte-macrophage colony-stimulating factor (GM-CSF), thrombopoietin, fibroblast growth factor (FGF), platelet-derived growth factor (PDGF), transforming growth factor beta (TGF-B), tumor necrosis factor alpha (TNF-A), megakaryocyte growth and development factor (MGDF), leukemia inhibitory factor (LIF), and Flt3 ligand. Each interleukin or growth factor may typically be supplied at a concentration of 0.1-100 ng/mL. The first step may also optionally comprise contacting the cells in culture with serum proteins or non-protein molecules such as, e.g., fetal bovine serum (1-20%), human plasma (1-20%), plasmanate (1-20%), human serum (1-20%), albumin (0.1-100 mg/mL), or heparin (0.1-10 U/mL).

[0451] The second step may comprise contacting the cells in culture with stem cell factor (SCF) at 1-1000 ng/mL and erythropoietin (EPO) at 1-100 U/mL. The second step may also optionally comprise contacting the cells in culture with an insulin-like molecule, such as e.g., insulin at 1-50 μg/mL, insulin-like growth factor 1 (IGF-1) at 1-50 μg/mL, insulin-like growth factor 2 (IGF-2) at 1-50 μg/mL, or mechano-growth factor at 1-50 μg/mL. The second step may further optionally comprise contacting the cells in culture with transferrin at 0.1-5 mg/mL. The second may also optionally comprise contacting the cells in culture with serum proteins or non-protein molecules such as, e.g., fetal bovine serum (1-20%), human plasma (1-20%), plasmanate (1-20%), human serum (1-20%), albumin (0.1-100 mg/mL), or heparin (0.1-10 U/mL).

[0452] The third step may comprise contacting the cells in culture with erythropoietin (EPO) at 1-100 U/mL. The third step may optionally comprise contacting the cells in culture with stem cell factor (SCF) at 1-1000 ng/mL. The third step may further optionally comprise contacting the cells in culture with an insulin-like molecule, such as e.g., insulin at 1-50 μg/mL, insulin-like growth factor 1 (IGF-1) at 1-50 μg/mL, insulin-like growth factor 2 (IGF-2) at 1-50 μg/mL, or mechano-growth factor at 1-50 μg/mL. The third step may also optionally comprise contacting the cells in culture with transferrin at 0.1-5 mg/mL. The third step may also optionally comprise contacting the cells in culture with serum proteins or non-protein molecules such as, e.g., fetal bovine serum (1-20%), human plasma (1-20%), plasmanate (1-20%), human serum (1-20%), albumin (0.1-100 mg/mL), or heparin (0.1-10 U/mL).

[0453] In some embodiments, methods of expansion and differentiation of the engineered erythroid cells presenting one or more exogenous polypeptides, do not include culturing the engineered erythroid cells in a medium comprising a myeloproliferative receptor (mpl) ligand.

[0454] The culture process may optionally comprise contacting cells by a method known in the art with a molecule, e.g., a DNA molecule, an RNA molecule, a mRNA, an siRNA, a microRNA, a lncRNA, a shRNA, a hormone, or a small molecule, that activates or knocks down one or more genes. Target genes can include, for example, genes that encode a transcription factor, a growth factor, or a growth factor receptor, including but not limited to, e.g., GATA1, GATA2, CMyc, hTERT, p53, EPO, SCF, insulin, EPO-R, SCF-R, transferrin-R, insulin-R.

[0455] In some embodiments, CD34+ cells are placed in a culture containing varying amounts of IMDM, FBS, glutamine, BSA, holotransferrin, insulin, dexamethasone, .beta.-estradiol, IL-3, SCF, and erythropoietin, in three separate differentiation stages for a total of 22 days.

[0456] In some embodiments, CD34+ cells are placed in a culture containing varying amounts of IMDM, FBS, glutamine, BSA, holotransferrin, insulin, dexamethasone, β-estradiol, IL-3, SCF, and thrombopoietin, in three separate differentiation stages for a total of 14 days.

[0457] In some embodiments, CD34+cells are placed in a culture containing varying amounts of IMDM, FBS, glutamine, BSA, holotransferrin, insulin, dexamethasone, β-estradiol, IL-3, SCF, and GCSF, in three separate differentiation stages for a total of 15 days.

[0458] In some embodiments, the erythroid cells are expanded at least 100, 1000, 2000, 5000, 10,000, 20,000, 50,000, or 100,000 fold (and optionally up to 100,000, 200,000, or 500,000 fold). Number of cells is measured, in some embodiments, using an automated cell counter.

[0459] In some embodiments, it may be desirable during culturing to only partially differentiate the erythroid precursor cells, e.g., hematopoietic stem cells, in vitro, allowing further differentiation, e.g., differentiation into reticulocytes or fully mature erythrocytes, to occur upon introduction to a subject in vivo (see, e.g., Neildez-Nguyen et al. (2002) Nature Biotech. 20: 467-72). It will be understood that, in various embodiments, as described herein, maturation and/or differentiation in vitro may be arrested at any stage desired. For example, isolated CD34+ hematopoietic stem cells may be expanded in vitro as described elsewhere herein, e.g., in medium containing various factors, including, for example, interleukin 3, Flt3 ligand, stem cell factor, thrombopoietin, erythropoietin, transferrin, and insulin growth factor, to reach a desired stage of differentiation. The resulting engineered erythroid cells may be characterized by the surface expression of CD36 and GPA, and other characteristics specific to the particular desired cell type, and may be transfused into a subject where terminal differentiation to mature erythrocytes is allowed to occur.

[0460] In some embodiments, engineered erythroid cells are partially expanded from erythroid precursor cells to any stage of maturation prior to but not including enucleation, and thus remain nucleated cells, e.g., erythrocyte precursor cells. In certain embodiments, the resulting cells are nucleated and erythroid lineage restricted. In certain embodiments, the resulting cells are selected from multipotent myeloid progenitor cells, CFU-S cells, BFU-E cells, CFU-E cells, pronormoblasts (proerythroblast), basophilic normoblasts, polychromatophilic normoblasts and orthochromatophilic normoblasts. The final differentiation steps, including enucleation, occur only after administration of the engineered erythroid cell to a subject, that is, in such embodiments, the enucleation step occurs in vivo. In other embodiments, engineered erythroid cells are expanded and differentiated in vitro through the stage of enucleation to become, e.g., reticulocytes. In such embodiments where the engineered erythroid cells are differentiated to the stage of reticuloyctes, the final differentiation step to become erythrocytes occurs only after administration of the engineered erythroid cell to a subject, that is, the terminal differentiation step occurs in vivo. In other embodiments, engineered erythroid cells are expanded and differentiated in vitro through the terminal differentiation stage to become erythrocytes.

[0461] It will be further recognized that in some embodiments, the engineered erythroid cells may be expanded and differentiated from erythroid precursor cells, e.g., hematopoietic stem cells, to become hematopoietic cells of different lineage, such as, for example, to become platelets. Methods for maturing and differentiating hematopoietic cells of various lineages, such as platelets, are well known in the art to the skilled artisan. Such engineered platelets expressing exogenous polypeptides as described herein are considered to be encompassed by the present disclosure.

[0462] In some embodiments, an enucleated cell provided herein is a platelet. Methods of manufacturing platelets in vitro are known in the art (see, e.g., Wang and Zheng (2016) Springerplus 5(1): 787, and U.S. Pat. No. 9,574,178). Methods of manufacturing platelets including an exogenous polypeptide are described, e.g., in International Patent Application Publication Nos. WO2015/073587 and WO2015/153102, each of which is incorporated by reference in its entirety. Platelet production is in part regulated by signaling mechanisms induced by interaction between thrombopoietin (TPO) and its cellular receptor TPOR/MPUc-MPL. In addition, multiple cytokines (e.g., stem cell factor (SCF), IL-3, IL-6, IL-11, leukemia inhibiting factor (LIF), G-CSF, GM-CSF, M-CSF, erythropoietin (EPO), kit ligand, and interferon) have been shown to possess thrombocytopoietic activity.

[0463] In some embodiments, platelets are generated from hematopoietic progenitor cells, such as CD34+ hematopoietic stem cells, induced pluripotent stem cells or embryonic stem cells. In some embodiments, platelets are produced by contacting the progenitor cells with defined factors in a multi-step culture process. In some embodiments, the multi-step culture process comprises: culturing a population of hematopoietic progenitor cells under conditions suitable to produce a population of megakaryocyte progenitor cells, and culturing the population of megakaryocyte progenitor cells under conditions suitable to produce platelets. Cocktails of growth and differentiation factors that are suitable to expand and differentiate progenitor cells and produce platelets are known in the art. Examples of suitable expansion and differentiation factors include, but are not limited to, stem cell factor (SCF), Flt-3/Flk-2 ligand (FL), TPO, IL-11, IL-3, IL-6, and IL-9. For instance, in some embodiments, platelets may be produced by seeding CD34⁺ HSCs in a serum-free medium at 2-4 ×10⁴ cells/mL, and refreshing the medium on culture day 4 by adding an equal volume of media. On culture day 6, cells are counted and analyzed: 1.5 ×10⁵ cells are washed and placed in 1 mL of the same medium supplemented with a cytokine cocktail comprising TPO (30 ng/mL), SCF (1 ng/mL), IL-6 (7.5 ng/mL), and IL-9 (13.5 ng/mL) to induce megakaryocyte differentiation. At culture day 10, from about one quarter to about half of the suspension culture is replaced with fresh media. The cells are cultured in a humidified atmosphere (10% CO₂) at 39° C. for the first 6 culture days, and at 37° C. for the last 8 culture days. Viable nucleated cells are counted with a hemocytometer following trypan blue staining. The differentiation state of platelets in culture can be assessed by flow cytometry or quantitative PCR as described in Examples 44 and 45 of in International Patent Application Publication No. WO2015/073587, incorporated herein by reference.

### Expression of Exogenous Polypeptides

[0464] In some embodiments, the engineered erythroid cells described herein are generated by contacting a suitable isolated cell, e.g., a nucleated erythroid cell, an erythroid precursor cell, or a nucleated platelet precursor cell, with an exogenous nucleic acid encoding a polypeptide of the disclosure (e.g., exogenous antigen-presenting polypeptides, exogenous antigenic polypeptides, exogenous coinhibitory polypeptides, cytokines, and exogenous Treg costimulatory polypeptides, or a combination thereof).

[0465] In some embodiments, the exogenous polypeptide is encoded by a DNA, which is contacted with a nucleated erythroid precursor cell or a nucleated platelet precursor cell. In some embodiments, the exogenous polypeptide is encoded by an RNA (e.g., an mRNA), which is contacted with a nucleated erythroid cell, an erythroid precursor cell, a nucleated platelet precursor cell.

[0466] In some embodiments, the exogenous polypeptide is contacted with a platelet, a nucleated erythroid cell, an erythroid precursor cell, a nucleated platelet precursor cell, a reticulocyte, or an erythrocyte.

[0467] In some embodiments, the exogenous polypeptide comprises an epitope tag sequence, which may be one, or a combination of, an HA-tag, Green fluorescent protein tag, Myc-tag, chitin binding protein, maltose binding protein, glutathione-S-transferase, poly(His)tag, thioredoxin, poly(NANP), FLAG-tag, V5-tag, AviTag, Calmodulin-tag, polyglutamate-tag, E-tag, S-tag, SBP-tag, Softag-1, Softag-3, Strep-tag, TC-tag, VSV-tag, Xpress-tag, Isopeptag, SpyTag, biotin carboxyl carrier protein, Nus-tag, Fc-tag, or Ty-tag. In some embodiments, the exogenous nucleic acid encoding an exogenous polypeptide comprises the 3′ end of a gene sequence for the exogenous polypeptide that is fused to an epitope tag sequence (e.g., at the N-terminus or C-terminus), of which may be one, or a combination of:, an; an HA-tag, gGreen fluorescent protein tag, Myc-tag, chitin binding protein, maltose binding protein, glutathione-S-transferase, poly(His)tag, thioredoxin, poly(NANP), FLAG-tag, V5-tag, AviTag, Calmodulin-tag, polyglutamate-tag, E-tag, S-tag, SBP-tag, Softag-1, Softag-3, Strep-tag, TC-tag, VSV-tag, Xpress-tag, Isopeptag, SpyTag, biotin carboxyl carrier protein, Nus-tag, Fc-tag, or Ty-tag. In some embodiments, the exogenous polypeptide comprises an epitope tag, such as an HA epitope tag(YPYDVPDYA (SEQ ID NO:27)), a cMyc tag (EQKLISEEDL (SEQ ID NO:28)), or a Flag tag (DYKDDDDK (SEQ ID NO:29)). The epitope tag may be used for the easy detection and quantification of expression using antibodies against the epitope tag by flow cytometry, western blot, or immunoprecipitation.

[0468] An exogenous polypeptide may be expressed from a transgene introduced into an erythroid cell by electroporation, chemical or polymeric transfection, viral transduction, mechanical membrane disruption, or other method; an exogenous polypeptide that is expressed from mRNA that is introduced into a cell by electroporation, chemical or polymeric transfection, viral transduction, mechanical membrane disruption, or other method; an exogenous polypeptide that is over-expressed from the native locus by the introduction of an external factor, e.g., a transcriptional activator, transcriptional repressor, or secretory pathway enhancer; and/or a polypeptide that is synthesized, extracted, or produced from a production cell or other external system and incorporated into the erythroid cell.

[0469] In certain embodiments, the introducing step comprises viral transduction. In some embodiments, the introducing step comprises electroporation. In other embodiments, the introducing step comprises utilizing one or more of liposome mediated transfer, adenovirus, adeno-associated virus, herpes virus, a retroviral based vector, lipofection, and a lentiviral vector.

[0470] In some embodiments, the introducing step comprises introducing the first exogenous nucleic acid encoding the first exogenous polypeptide by transfection of a lentiviral vector.

[0471] Exogenous nucleic acids (e.g., comprising DNA or RNA) encoding an exogenous polypeptide (e.g., exogenous antigen-presenting polypeptides, exogenous costimulatory polypeptides, exogenous coinhibitory polypeptides, cytokines, and exogenous Treg costimulatory polypeptides) can be introduced by transfection of single or multiple copies of genes, transduction with a virus, or electroporation. Methods for expression of exogenous proteins in mammalian cells are well known in the art. For example, expression of exogenous factor IX in hematopoietic cells is induced by viral transduction of CD34⁺ progenitor cells, see Chang et al. (2006) Nat. Biotechnol. 24: 1017-21.

[0472] In some embodiments, the DNA or RNA is codon optimized.

[0473] In some embodiments, the two or more polypeptides are encoded in a single nucleic acid, e.g. a single vector. In some embodiments, the single vector has a separate promoter for each gene, has two proteins that are initially transcribed into a single polypeptide having a protease cleavage site in the middle, so that subsequent proteolytic processing yields two proteins, or any other suitable configuration. In some embodiments, when there are more than one polypeptides (e.g. two or more) the polypeptides may be encoded in a single nucleic acid, e.g. a single vector. When exogenous immunogenic polypeptides, exogenous antigen-presenting polypeptides, exogenous coinhibitory polypeptides, cytokines, and exogenous Treg costimulatory polypeptides, or a combination thereof are encoded by the same exogenous nucleic acid (e.g., a vector), there are multiple possible sub-strategies useful for co-expression of the polypeptides. In some embodiments, the single exogenous nucleic acid (e.g., vector) has a separate promoter for each gene encoding an exogenous nucleic acid. In some embodiments, the exogenous nucleic acid encodes the two (or more) exogenous polypeptides whereby a “self-cleaving” 2A element is disposed between the cistrons encoding the exogenous polypeptides. The 2A element is believed to function by making the ribosome skip the synthesis of a peptide bond at the C-terminus of a 2A element, leading to separation between the end of the 2A sequence and the next polypeptide downstream (see, e.g., Holst et al. (2008) Nat. Immunol. 6:658-66).

[0474] For dual expression via two promoters, the MSCV promoter may be used as a first promoter and the EF1 promoter as a second promoter, although the disclosure is not to be limited by these two exemplary promoters. Another strategy is to express both two or more exogenous polypeptides by inserting an internal ribosome entry site (IRES) between the two genes encoding the polypeptides. Still another strategy is to express two or more exogenous polypeptides as direct peptide fusions separated by a linker.

[0475] In some embodiments, the two or more polypeptides are encoded by two or more exogenous nucleic acids, e.g., each vector encodes one of the exogenous polypeptides.

[0476] For dual expression via two promoters, the MSCV promoter may be used as a first promoter and the EF1 promoter as a second promoter, although the disclosure is not to be limited by these two exemplary promoters. Another strategy is to express both two or more exogenous polypeptides by inserting an internal ribosome entry site (IRES) between the two genes encoding the polypeptides. Still another strategy is to express two or more exogenous polypeptides as direct peptide fusions separated by a linker.

[0477] In some embodiments, the two or more polypeptides are encoded by two or more exogenous nucleic acids, e.g., each vector encodes one of the exogenous polypeptides.

[0478] In certain embodiments, the lentiviral vector is used which comprises a promoter selected from the group consisting of beta-globin promoter, murine stem cell virus (MSCV) promoter, Gibbon ape leukemia virus (GALV) promoter, human elongation factor lalpha (EFlalpha) promoter, CAG CMV immediate early enhancer and the chicken beta-actin (CAG), and human phosphoglycerate kinase 1 (PGK) promoter.

[0479] In some embodiments, the two or more polypeptides are encoded in two or more nucleic acids, e.g., each vector encodes one of the polypeptides.

[0480] Nucleic acids such as DNA expression vectors or mRNA for producing the exogenous polypeptides may be introduced into progenitor cells (e.g., an erythroid cell progenitor or a platelet progenitor and the like) that are suitable to produce the exogenous polypeptides described herein. The progenitor cells can be isolated from an original source or obtained from expanded progenitor cell population via routine recombinant technology as provided herein. In some instances, the expression vectors can be designed such that they can incorporate into the genome of cells by homologous or non-homologous recombination by methods known in the art.

[0481] In some embodiments, hematopoietic progenitor cells, e.g., CD34⁺ hematopoietic stem cells, are contacted with a nucleic acid or nucleic acids encoding one or more exogenous polypeptides, and the cells are allowed to expand and differentiate in culture.

[0482] In some instances, e.g., for an engineered erythroid cell (e.g., engineered enucleated erythroid cell) or enucleated cell (e.g., modified enucleated cell) comprising one or more exogenous polypeptides (exogenous immunogenic polypeptides, exogenous antigen-presenting polypeptides, exogenous coinhibitory polypeptides, cytokines, and exogenous Treg costimulatory polypeptides, or a combination thereof), a nucleic acid encoding a polypeptide that can selectively target and cut the genome, for example a CRISPR/Cas9, transcriptional activator-like effector nuclease (TALEN), or zinc finger nuclease, is used to direct the insertion of the exogenous nucleic acid of the expression vector encoding the exogenous polypeptide to a particular genomic location, for example the CR1 locus (1q32.2), the hemoglobin locus (11p15.4).

[0483] In some embodiments, one or more exogenous polypeptides (e.g., exogenous immunogenic polypeptides, exogenous antigen-presenting polypeptides, exogenous coinhibitory polypeptides, cytokines, and exogenous Treg costimulatory polypeptides, or a combination thereof) may be cloned into plasmid constructs for transfection. Methods for transferring expression vectors into cells that are suitable to produce the engineered erythroid cells (e.g., engineered enucleated erythroid cells) or enucleated cells (e.g., modified enucleated cells) described herein include, but are not limited to, viral mediated gene transfer, liposome mediated transfer, transformation, gene guns, transfection and transduction, e.g., viral mediated gene transfer such as the use of vectors based on DNA viruses such as adenovirus, adenoassociated virus and herpes virus, as well as retroviral based vectors. Examples of modes of gene transfer include e.g., naked DNA, CaPO₄ precipitation, DEAE dextran, electroporation, protoplast fusion, lipofection, and cell microinjection.

[0484] In some embodiments, recombinant DNA encoding each exogenous polypeptide may be cloned into a lentiviral vector plasmid for integration into erythroid cells. In some embodiments, the lentiviral vector comprises DNA encoding a single exogenous polypeptide for integration into erythroid cells. In other embodiments, the lentiviral vector comprises two, three, four or more exogenous polypeptides as described herein for integration into erythroid cells. In some embodiments, recombinant DNA encoding the one or more exogenous polypeptides may be cloned into a plasmid DNA construct encoding a selectable trait, such as an antibiotic resistance gene. In some embodiments, recombinant DNA encoding the exogenous polypeptides may be cloned into a plasmid construct that is adapted to stably express each recombinant protein in the erythroid cells.

[0485] In some embodiments, the lentiviral system may be employed where the transfer vector with exogenous polypeptides sequences (e.g., one, two, three, four or more exogenous polypeptide sequences), an envelope vector, and/or one or more packaging vectors are each transfected into host cells for virus production. In some embodiments, the lentiviral vectors may be transfected into host cells by any of calcium phosphate precipitation transfection, lipid-based transfection, or electroporation, and incubated overnight. For embodiments where the exogenous polypeptide sequence may be accompanied by a fluorescence reporter, inspection of the host cells for florescence may be checked after overnight incubation. The culture medium of the host cells comprising virus particles may be harvested 2 or 3 times every 8-12 hours and centrifuged to sediment detached cells and debris. The culture medium may then be used directly, frozen or concentrated as needed.

[0486] A progenitor cell subject to transfer of an exogenous nucleic acid that encodes an exogenous polypeptide can be cultured under suitable conditions allowing for differentiation and enucleation, e.g., the in vitro culturing process described herein.

[0487] Isolated erythroid precursor cells (e.g., a CD34⁺ hematopoietic stem cells) may be transfected with mRNA encoding one or more exogenous polypeptides (e.g., exogenous immunogenic polypeptides, exogenous antigen-presenting polypeptides, exogenous coinhibitory polypeptides, cytokines, and exogenous Treg costimulatory polypeptides, or a combination thereof) to generate an engineered erythroid cell (e.g., engineered enucleated erythroid cell) or enucleated cell (e.g., modified enucleated cell). Messenger RNA may be derived from in vitro transcription of a cDNA plasmid construct containing the coding sequence corresponding to the one or more exogenous polypeptides. For example, the cDNA sequence corresponding to the exogenous polypeptide may be inserted into a cloning vector containing a promoter sequence compatible with specific RNA polymerases. For example, the cloning vector ZAP EXPRESS pBK-CMV (Stratagene, La Jolla, Calif., USA) contains T3 and T7 promoter sequence compatible with T3 and T7 RNA polymerase, respectively. For in vitro transcription of sense mRNA, the plasmid is linearized at a restriction site downstream of the stop codon(s) corresponding to the end of the coding sequence of the exogenous polypeptide. The mRNA is transcribed from the linear DNA template using a commercially available kit such as, for example, the RNAMAXX High Yield Transcription Kit (from Stratagene, La Jolla, Calif, USA). In some instances, it may be desirable to generate 5′-m7GpppG-capped mRNA. As such, transcription of a linearized cDNA template may be carried out using, for example, the mMESSAGE mMACHINE High Yield Capped RNA Transcription Kit from Ambion (Austin, Tex., USA). Transcription may be carried out in a reaction volume of 20-100 μl at 37° C. for 30 min to 4 h. The transcribed mRNA is purified from the reaction mix by a brief treatment with DNase Ito eliminate the linearized DNA template followed by precipitation in 70% ethanol in the presence of lithium chloride, sodium acetate or ammonium acetate. The integrity of the transcribed mRNA may be assessed using electrophoresis with an agarose-formaldehyde gel or commercially available Novex pre-cast TBE gels (e.g., Novex, Invitrogen, Carlsbad, Calif., USA).

[0488] Messenger RNA encoding the one or more exogenous polypeptides (e.g., exogenous antigenic polypeptides, exogenous antigen-presenting polypeptides, exogenous coinhibitory polypeptides, cytokines, and exogenous Treg costimulatory polypeptides, or a combination thereof) may be introduced into erythroid precursor cells (e.g., a CD34⁺ hematopoietic stem cell) using a variety of approaches including, for example, lipofection and electroporation (van Tandeloo et al. (2001) Blood 98: 49-56). For lipofection, for example, 5μg of in vitro transcribed mRNA in Opti-MEM (Invitrogen, Carlsbad, Calif, USA) is incubated for 5-15 min at a 1:4 ratio with the cationic lipid DMRIE-C(Invitrogen). Alternatively, a variety of other cationic lipids or cationic polymers may be used to transfect cells with mRNA including, for example, DOTAP, various forms of polyethylenimine, and polyL-lysine (Sigma-Aldrich, Saint Louis, Mo., USA), and Superfect (Qiagen, Inc., Valencia, Calif, USA; See, e.g., Bettinger et al. (2001) Nucleic Acids Res. 29: 3882-91). The resulting mRNA/lipid complexes are incubated with cells (1-2×10⁶ cells/ml) for 2 h at 37° C., washed and returned to culture. For electroporation, for example, about 5 to 20×10⁶ cells in 500 μl of Opti-MEM (Invitrogen, Carlsbad, Calif., USA) are mixed with about 20 μg of in vitro transcribed mRNA and electroporated in a 0.4-cm cuvette using, for example, and Easyject Plus device (EquiBio, Kent, United Kingdom). In some instances, it may be necessary to test various voltages, capacitances and electroporation volumes to determine the useful conditions for transfection of a particular mRNA into a . In general, the electroporation parameters required to efficiently transfect cells with mRNA appear to be less detrimental to cells than those required for electroporation of DNA (van Tandeloo et al. (2001)).

[0489] Alternatively, mRNA may be transfected into a erythroid precursor cells (e.g., a CD34⁺ cell) using a peptide-mediated RNA delivery strategy (see, e.g., Bettinger et al. (2001)). For example, the cationic lipid polyethylenimine 2 kDA (Sigma-Aldrich, Saint Louis, Mo., USA) may be combined with the melittin peptide (Alta Biosciences, Birmingham, UK) to increase the efficiency of mRNA transfection, particularly in post-mitotic primary cells. The mellitin peptide may be conjugated to the PEI using a disulfide cross-linker such as, for example, the hetero-bifunctional cross-linker succinimidyl 3-(2-pyridyldithio) propionate. In vitro transcribed mRNA is preincubated for 5 to 15 min with the mellitin-PEI to form an RNA/peptide/lipid complex. This complex is then added to cells in serum-free culture medium for 2 to 4 h at 37° C. in a 5% CO₂ humidified environment and then removed and the transfected cells allowed to continue growing in culture.

[0490] In some embodiments, the engineered erythroid cell (e.g., engineered enucleated erythroid cell) or enucleated cell (e.g., modified enucleated cell) is generated by contacting a suitable isolated erythroid precursor cell or a platelet precursor cell with an exogenous nucleic acid encoding one or more exogenous polypeptides (e.g.,, exogenous antigen-presenting polypeptides, exogenous coinhibitory polypeptides, cytokines, and exogenous Treg costimulatory polypeptides, or a combination thereof). In some embodiments, the exogenous polypeptide is encoded by a DNA, which is contacted with a nucleated erythroid precursor cell or a nucleated platelet precursor cell. In some embodiments, the exogenous polypeptide is encoded by an RNA, which is contacted with a platelet, a nucleated erythroid cell, or a nucleated platelet precursor cell.

[0491] The one or more exogenous polypeptides (e.g., exogenous antigen-presenting polypeptides, exogenous coinhibitory polypeptides, cytokines, and exogenous Treg costimulatory polypeptides, or a combination thereof) may be genetically introduced into erythroid precursor cells, platelet precursor, or nucleated erythroid cells prior to terminal differentiation using a variety of DNA techniques, including transient or stable transfections and gene therapy approaches. The exogenous polypeptides may be expressed on the surface and/or in the cytoplasm of erythroid cell or platelet.

[0492] Viral gene transfer may be used to transfect the cells with DNA encoding one or more exogenous polypeptides (e.g., exogenous antigen-presenting polypeptides, exogenous coinhibitory polypeptides, cytokines, and exogenous Treg costimulatory polypeptides, or a combination thereof). A number of viruses may be used as gene transfer vehicles including Moloney murine leukemia virus (MMLV), adenovirus, adeno-associated virus (AAV), herpes simplex virus (HSV), lentiviruses such as human immunodeficiency virus 1 (HIV 1), and spumaviruses such as foamy viruses, for example (See, e.g., Osten et al. (2007) Handb. Exp. Pharmacol. 178: 177-202). Retroviruses, for example, efficiently transduce mammalian cells including human cells and integrate into chromosomes, conferring stable gene transfer.

[0493] One or more exogenous polypeptides (e.g., exogenous antigen-presenting polypeptides, exogenous coinhibitory polypeptides, cytokines, and exogenous Treg costimulatory polypeptides, or a combination thereof) may be transfected into an erythroid precursor cell, a platelet precursor, or a nucleated erythroid cell, expressed and subsequently retained and exhibited in an engineered erythroid cell (e.g., an engineered enucleated erythroid cell) or an enucleated cell (e.g., modified enucleated cell), as described herein. A suitable vector is the Moloney murine leukemia virus (MMLV) vector backbone (Malik et al. (1998) Blood 91: 2664-71). For example, a DNA construct containing the cDNA encoding an exogenous polypeptide can be generated in the MMLV vector backbone using standard molecular biology techniques. The construct is transfected into a packaging cell line such as, for example, PA317 cells and the viral supernatant is used to transfect producer cells such as, for example, PG13 cells. The PG13 viral supernatant is incubated with an erythroid precursor cell, a platelet precursor, or a nucleated erythroid cell that has been isolated and cultured or has been freshly isolated as described herein. The expression of the exogenous polypeptide may be monitored using FACS analysis (fluorescence-activated cell sorting), for example, with a fluorescently labeled antibody directed against the exogenous polypeptide, if it is located on the surface of the engineered erythroid cell (e.g., engineered enucleated erythroid cell) or enucleated cell (e.g., modified enucleated cell). Similar methods may be used to express an exogenous polypeptide that is located in the inside of the engineered erythroid cell (e.g., engineered enucleated erythroid cell) or enucleated cell (e.g., modified enucleated cell).

[0494] Optionally, a fluorescent tracking molecule such as, for example, green fluorescent protein (GFP) may be transfected using a viral-based approach (Tao et al. (2007) Stem Cells 25: 670-8). Ecotopic retroviral vectors containing DNA encoding the enhanced green fluorescent protein (EGFP) or a red fluorescent protein (e.g., DsRed-Express) are packaged using a packaging cell such as, for example, the Phoenix-Eco cell line (distributed by Orbigen, San Diego, Calif.). Packaging cell lines stably express viral proteins needed for proper viral packaging including, for example, gag, pol, and env. Supernatants from the Phoenix-Eco cells into which viral particles have been shed are used to transduce e.g., erythroid precursor cells, platelet precursors, or a nucleated erythroid cells. In some instances, transduction may be performed on a specially coated surface such as, for example, fragments of recombinant fibronectin to improve the efficiency of retroviral mediated gene transfer (e.g., RetroNectin, Takara Bio USA, Madison, Wis.). Cells are incubated in RetroNectin-coated plates with retroviral Phoenix-Eco supernatants plus suitable co-factors. Transduction may be repeated the next day. In this instance, the percentage of cells expressing EGFP or DsRed-Express may be assessed by FACS. Other reporter genes that may be used to assess transduction efficiency include, for example, beta-galactosidase, chloramphenicol acetyltransferase, and luciferase as well as low-affinity nerve growth factor receptor (LNGFR), and the human cell surface CD24 antigen (Bierhuizen et al. (1999)Leukemia 13: 605-13).

[0495] Nonviral vectors may be used to introduce genetic material into suitable erythroid cells, platelets or precursors thereof to generate engineered erythroid cells (e.g., engineered enucleated erythroid cells) or enucleated cells (e.g., modified enucleated cells). Nonviral-mediated gene transfer differs from viral-mediated gene transfer in that the plasmid vectors contain no proteins, are less toxic and easier to scale up, and have no host cell preferences. The “naked DNA” of plasmid vectors is by itself inefficient in delivering genetic material encoding a polypeptide to a cell and therefore is combined with a gene delivery method that enables entry into cells. A number of delivery methods may be used to transfer nonviral vectors into suitable erythroid cells, platelets or precursors thereof including chemical and physical methods.

[0496] A nonviral vector encoding one or more exogenous polypeptides (e.g., exogenous antigen-presenting polypeptides, exogenous coinhibitory polypeptides, cytokines, and exogenous Treg costimulatory polypeptides, or a combination thereof) may be introduced into suitable erythroid cells, platelets or precursors thereof using synthetic macromolecules such as cationic lipids and polymers (Papapetrou et al. (2005) Gene Therapy 12: S118-30). Cationic liposomes, for example form complexes with DNA through charge interactions. The positively charged DNA/lipid complexes bind to the negative cell surface and are taken up by the cell by endocytosis. This approach may be used, for example, to transfect hematopoietic cells (See, e.g., Keller et al. (1999) Gene Therapy 6: 931-8). For erythroid cells, platelets or precursors thereof the plasmid DNA (approximately 0.5 μg in 25-100 μL of a serum free medium, such as, for example, OptiMEM (Invitrogen, Carlsbad, Calif.)) is mixed with a cationic liposome (approximately 4 μg in 25 μL of serum free medium) such as the commercially available transfection reagent Lipofectamine™ (Invitrogen, Carlsbad, Calif.) and allowed to incubate for at least 20 min to form complexes. The DNA/liposome complex is added to suitable erythroid cells, platelets or precursors thereof and allowed to incubate for 5-24 h, after which time transgene expression of the polypeptide may be assayed. Alternatively, other commercially available liposome transfection agents may be used (e.g., In vivo GeneSHUTTLE, Qbiogene, Carlsbad, Calif.).

[0497] Optionally, a cationic polymer such as, for example, polyethylenimine (PEI) may be used to efficiently transfect erythroid cell progenitor cells, for example hematopoietic and umbilical cord blood-derived CD34+ cells (See, e.g., Shin et al. (2005) Biochim. Biophys. Acta 1725: 377-84). Human CD34+ cells are isolated from human umbilical cord blood and cultured in Iscove's modified Dulbecco's medium supplemented with 200 ng/ml stem cell factor and 20% heat-inactivated fetal bovine serum. Plasmid DNA encoding the exogenous polypeptide is incubated with branched or linear PEIs varying in size from 0.8 K to 750 K (Sigma Aldrich, Saint Louis, Mo., USA; Fermetas, Hanover, Md., USA). PEI is prepared as a stock solution at 4.2 mg/ml distilled water and slightly acidified to pH 5.0 using HC1. The DNA may be combined with the PEI for 30 min at room temperature at various nitrogen/phosphate ratios based on the calculation that 1μg of DNA contains 3 nmol phosphate and 1 μl of PEI stock solution contains 10 nmol amine nitrogen. The isolated CD34+cells are seeded with the DNA/cationic complex, centrifuged at 280×g for 5 min and incubated in culture medium for 4 or more h until gene expression of the polypeptide is assessed.

[0498] A plasmid vector may be introduced into suitable erythroid cells, platelets or precursors thereof using a physical method such as particle-mediated transfection, “gene gun”, biolistics, or particle bombardment technology (Papapetrou et al. (2005)). In this instance, DNA encoding the polypeptide is absorbed onto gold particles and administered to cells by a particle gun. This approach may be used, for example, to transfect erythroid precursor cells, e.g., hematopoietic stem cells derived from umbilical cord blood (See, e.g., Verma et al. (1998) Gene Therapy 5: 692-9). As such, umbilical cord blood is isolated and diluted three fold in phosphate buffered saline. CD34+ cells are purified using an anti-CD34 monoclonal antibody in combination with magnetic microbeads coated with a secondary antibody and a magnetic isolation system (e.g., Miltenyi MiniMac System, Auburn, Calif., USA). The CD34+ enriched cells may be cultured as described herein. For transfection, plasmid DNA encoding the polypeptide is precipitated onto a particle, for example gold beads, by treatment with calcium chloride and spermidine. Following washing of the DNA-coated beads with ethanol, the beads may be delivered into the cultured cells using, for example, a Biolistic PDS-1000/He System (Bio-Rad, Hercules, Calif., USA). A reporter gene such as, for example, beta-galactosidase, chloramphenicol acetyltransferase, luciferase, or green fluorescent protein may be used to assess efficiency of transfection.

[0499] Optionally, electroporation methods may be used to introduce a plasmid vector into suitable erythroid cells, platelets or precursors thereof. Electroporation creates transient pores in the cell membrane, allowing for the introduction of various molecules into the cells including, for example, DNA and RNA as well as antibodies and drugs. As such, CD34+ cells are isolated and cultured as described herein. Immediately prior to electroporation, the cells are isolated by centrifugation for 10 min at 250xg at room temperature and resuspended at 0.2-10×10⁶ viable cells/ml in an electroporation buffer such as, for example, X-VIVO™ 10 media supplemented with 1.0% human serum albumin (HSA). The plasmid DNA (1-50 μg) is added to an appropriate electroporation cuvette along with 500 μl of cell suspension. Electroporation may be done using, for example, an ECM 600 electroporator (Genetronics, San Diego, Calif, USA) with voltages ranging from 200 V to 280 V and pulse lengths ranging from 25 to 70 milliseconds. A number of alternative electroporation instruments are commercially available and may be used for this purpose (e.g., Gene Pulser XCELL, BioRad, Hercules, Calif.; Cellject Duo, Thermo Science, Milford, Mass.). Alternatively, efficient electroporation of isolated CD34+cells may be performed using the following parameters: 4 mm cuvette, 1600 μF, 550 V/cm, and 10 μg of DNA per 500 μl of cells at 1×10⁵ cells/ml (Oldak et al. (2002) Acta Biochimica Polonica 49: 625-32).

[0500] Nucleofection, a form of electroporation, may also be used to transfect suitable erythroid cells, platelets or precursors thereof In this instance, transfection is performed using electrical parameters in cell-type specific solutions that enable DNA (or other reagents) to be directly transported to the nucleus thus reducing the risk of possible degradation in the cytoplasm. For example, a Human CD34 CELL NUCLEOFECTOR Kit (from Amaxa Inc.) may be used to transfect suitable erythroid cells, platelets or precursors thereof. In this instance, 1-5×10⁶ cells in Human CD34 Cell NUCLEOFECTOR Solution are mixed with 1-5 μg of DNA and transfected in the NUCLEOFECTOR instrument using preprogrammed settings as determined by the manufacturer.

[0501] Erythroid cells, platelets or precursors thereof may be non-virally transfected with a conventional expression vector which is unable to self-replicate in mammalian cells unless it is integrated in the genome. Alternatively, erythroid cells, platelets or precursors thereof may be transfected with an episomal vector which may persist in the host nucleus as autonomously replicating genetic units without integration into chromosomes (Papapetrou et al. (2005)). These vectors exploit genetic elements derived from viruses that are normally extrachromosomally replicating in cells upon latent infection such as, for example, EBV, human polyomavirus BK, bovine papilloma virus-1 (BPV-1), herpes simplex virus-1 (HSV) and Simian virus 40 (SV40). Mammalian artificial chromosomes may also be used for nonviral gene transfer (Vanderbyl et al. (2005) Exp. Hematol. 33: 1470-6).

[0502] Exogenous nucleic acids encoding one or more exogenous polypeptides (e.g., exogenous antigen-presenting polypeptides, exogenous coinhibitory polypeptides, cytokines, and exogenous Treg costimulatory polypeptides, or a combination thereof) may be assembled into expression vectors by standard molecular biology methods known in the art, e.g., restriction digestion, overlap-extension PCR, and Gibson assembly.

[0503] Exogenous nucleic acids may comprise a gene encoding one or more exogenous polypeptides (e.g., exogenous antigen-presenting polypeptides, exogenous coinhibitory polypeptides, cytokines, and exogenous Treg costimulatory polypeptides, or a combination thereof) that are not normally expressed on the cell surface, e.g., of an erythroid cell, fused to a gene that encodes an endogenous or native membrane protein, such that the exogenous polypeptide is expressed on the cell surface. For example, a exogenous gene encoding an exogenous antigenic polypeptide can be cloned at the N terminus following the leader sequence of a type 1 membrane protein, at the C terminus of a type 2 membrane protein, or upstream of the GPI attachment site of a GPI-linked membrane protein.

[0504] Standard cloning methods can be used to introduce flexible amino acid linkers between two fused genes. For example, the flexible linker is a poly-glycine poly-serine linker such as [Gly4Ser]3 (SEQ ID NO:31) commonly used in generating single-chain antibody fragments from full-length antibodies (Antibody Engineering: Methods & Protocols, Lo 2004), or Ala-Gly-Ser-Thr polypeptides such as those used to generate single-chain Arc repressors (Robinson & Sauer, Proc. Nat'l. Acad. Sci. USA 1998). In some embodiments, the flexible linker provides the polypeptide with more flexibility and steric freedom than the equivalent construct without the flexible linker.

[0505] An epitope tag may be placed between two fused genes, such as, e.g., a nucleic acid sequence encoding an HA epitope tag-amino acids YPYDVPDYA (SEQ ID NO:32), a CMyc tag-amino acids EQKLISEEDL (SEQ ID NO:33), or a Flag tag-amino acids DYKDDDDK (SEQ ID NO:34). The epitope tag may be used for the facile detection and quantification of expression using antibodies against the epitope tag by flow cytometry, western blot, or immunoprecipitation.

[0506] In some embodiments, the engineered erythroid cell (e.g., engineered enucleated erythroid cell) or enucleated cell (e.g., modified enucleated cell) comprises one or more exogenous polypeptides (e.g., exogenous antigen-presenting polypeptides, exogenous coinhibitory polypeptides, cytokines, and exogenous Treg costimulatory polypeptides, or a combination thereof) and at least one other heterologous polypeptide. The at least one other heterologous polypeptide can be a fluorescent protein. The fluorescent protein can be used as a reporter to assess transduction efficiency. In some embodiments, the fluorescent protein is used as a reporter to assess expression levels of the exogenous polypeptide if both are made from the same transcript. In some embodiments, the at least one other polypeptide is heterologous and provides a function, such as, e.g., multiple antigens, multiple capture targets, enzyme cascade. In some embodiments, the recombinant nucleic acid comprises a gene encoding an antigenic polypeptide and a second gene, wherein the second gene is separated from the gene encoding the antigenic polypeptide by a viral-derived T2A sequence (gagggcagaggaagtcttctaacatgcggtgacgtggaggsgsstcccggccct (SEQ ID NO:35)) that is post-translationally cleaved into two mature proteins.

[0507] In some embodiments, the exogenous nucleic acid encoding an exogenous antigen-presenting polypeptide comprises a gene sequence for an HLA cell surface protein that is fused to the 3′ end of the sequence for Kell and amplified using PCR. In some embodiments, the exogenous nucleic acid encoding an exogenous antigen-presenting polypeptide comprises a gene sequence for an HLA cell surface protein that is fused to a poly-glycine/serine linker, followed by the 3′ end of the sequence for Kell, and amplified using PCR. In some embodiments, the exogenous nucleic acid encoding an exogenous antigen-presenting polypeptide comprises the 3′ end of a gene sequence for an HLA cell surface protein that is fused to an epitope tag sequence, of which may be one, or a combination of, an; HA-tag, Green fluorescent protein tag, Myc-tag, chitin binding protein, maltose binding protein, glutathione-S-transferase, poly(His)tag, thioredoxin, poly(NANP), FLAG-tag, V5-tag, AviTag, Calmodulin-tag, polyglutamate-tag, E-tag, S-tag, SBP-tag, Softag-1, Softag-3, Strep-tag, TC-tag, VSV-tag, Xpress-tag, Isopeptag, SpyTag, biotin carboxyl carrier protein, Nus-tag, Fc-tag, or Ty-tag. The entire construct is fused to the 3′ end of the sequence for Kell and then amplified using PCR. The exogenous gene constructs encoding the various exogenous antigen-presenting polypeptides are, for example, subsequently loaded into a lentiviral vector and used to transduce a cell population.

[0508] In some embodiments, a population of erythroid cells is incubated with lentiviral vectors comprising exogenous nucleic acid encoding one or more exogenous polypeptides (e.g., exogenous antigen-presenting polypeptides, exogenous costimulatory polypeptides, exogenous coinhibitory polypeptides, cytokines, and exogenous Treg costimulatory polypeptides), specific plasmids of which may include; pLKO.1 puro, PLK0.1—TRC cloning vector, pSico, FUGW, pLVTHM, pLJM1, pLion11, pMD2.G, pCMV-VSV-G, pCI-VSVG, pCMV-dR8.2 dvpr, psPAX2, pRSV-Rev, and pMDLg/pRRE to generate an engineered erythroid cell (e.g., engineered enucleated erythroid cell) or enucleated cell (e.g., modified enucleated cell). The vectors may be administered at 10, 100, 1,000, 10,000 pfu and incubated for 12 hrs.

[0509] Erythroid cells described herein can also be produced using coupling reagents to link an exogenous polypeptide to a cell (e.g., using click chemistry as described in detail above). In some embodiments, a first exogenous polypeptide is coupled to the cell (e.g., using click chemistry) and a second exogenous polypeptide comprises a polypeptide expressed from an exogenous nucleic acid.

[0510] Methods of manufacturing enucleated erythroid cells comprising (e.g., expressing) an exogenous polypeptides are described, e.g., in WO2015/073587 and WO2015/153102, each of which is incorporated by reference in its entirety.

### III. Methods of Using Engineered Erythroid Cells or Enucleated Cells

[0511] The present disclosure contemplates various methods of using the engineered erythroid cells (e.g., engineered enucleated erythroid cells) or enucleated cells (e.g., modified enucleated cells) including a wild-type or loadable exogenous antigen-presenting polypeptide, as described herein.

[0512] As would be understood by one skilled in the art, based upon the disclosure provided herein, the dose and timing of administration of the engineered erythroid cells or enucleated cells can be specifically tailored for each application described herein. In essence, the engineered erythroid cells or enucleated cells of the disclosure, and the methods disclosed herein, provide an almost limitless number of variations and the disclosure is not limited in any way to any particular combination or approach. The skilled artisan, armed with the teachings provided herein and the knowledge available in the art, can readily determine the desired approach for each particular subject, disease indication, or target immune cell population.

[0513] In some aspects, the disclosure provides a method of treating a subject in need of an altered immune response, the method comprising determining an HLA status of the subject, selecting an engineered erythroid cell or enucleated cell comprising a loadable exogenous antigen-presenting polypeptide on the cell surface, wherein the antigen-presenting polypeptide is immunologically compatible with the subject, and wherein the loadable exogenous antigen-presenting polypeptide comprises one or more amino acid substitutions which stabilize the loadable exogenous antigen-presenting polypeptide on the cell surface, contacting the engineered enucleated erythroid cell with an exogenous antigenic polypeptide to the loadable exogenous antigen-presenting polypeptide; and administering the engineered erythroid cell or enucleated cell to the subject, thereby treating the subject. In some embodiments, the loadable exogenous antigen-presenting polypeptide is stabilized in the absence of a polypeptide bound to the exogenous antigen-presenting polypeptide.

[0514] In some aspects, the disclosure provides a method of treating a subject in need of an altered immune response, the method comprising determining an HLA status of the subject, selecting an engineered erythroid cell or enucleated cell comprising a wild-type exogenous antigen-presenting polypeptide on the cell surface, wherein the antigen-presenting polypeptide is immunologically compatible with the subject, contacting the engineered enucleated erythroid cell with an exogenous antigenic polypeptide to the wild-type exogenous antigen-presenting polypeptide; and administering the engineered erythroid cell or enucleated cell to the subject, thereby treating the subject.

[0515] In some embodiments, the method comprises conjugating an exogenous antigenic polypeptide to the wild-type or loadable exogenous antigen-presenting polypeptide.

[0516] In some embodiments, a displaceable exogenous polypeptide is bound to the loadable exogenous antigen-presenting polypeptide. In some embodiments, the displaceable exogenous polypeptide is displaced from the loadable exogenous antigen-presenting polypeptide with the exogenous antigenic polypeptide prior to administering the engineered enucleated erythroid cell to the subject. In some embodiments, the method further comprises conjugating the exogenous antigenic polypeptide to the loadable exogenous antigen-presenting polypeptide

[0517] In some embodiments, the method comprises selecting an exogenous antigenic polypeptide. In some embodiments, the subject has or is at risk of developing a cancer. In some embodiments, the subject has or is at risk of developing an autoimmune disease. In some embodiments, the subject has or is at risk of developing an infectious disease.

[0518] In other aspects, the disclosure provides a method of making an engineered enucleated erythroid cell comprising an antigen-loaded wild-type or loadable exogenous antigen-presenting polypeptide, the method comprising obtaining an engineered enucleated erythroid cell comprising a loadable exogenous antigen-presenting polypeptide on the cell surface, wherein the antigen-presenting polypeptide is immunologically compatible with the subject, and wherein the loadable exogenous antigen-presenting polypeptide comprises one or more amino acid substitutions which stabilize the loadable exogenous antigen-presenting polypeptide on the cell surface, and contacting the engineered enucleated erythroid cell with an exogenous antigenic polypeptide to the loadable exogenous antigen-presenting polypeptide; thereby preparing an engineered enucleated erythroid cell comprising an antigen-loaded exogenous antigen-presenting polypeptide. In some embodiments, the loadable exogenous antigen-presenting polypeptide is stabilized in the absence of a polypeptide bound to the exogenous antigen-presenting polypeptide.

[0519] In some embodiments, the method comprises conjugating the exogenous antigenic polypeptide to the loadable exogenous antigen-presenting polypeptide. In other embodiments, the method further comprising selecting an exogenous antigenic polypeptide suitable for administration to the subject.

[0520] In some embodiments, a displaceable exogenous polypeptide is bound to the loadable exogenous antigen-presenting polypeptide

[0521] In some embodiments, the method comprises, displacing the displaceable exogenous polypeptide from the loadable exogenous antigen-presenting polypeptide with the exogenous antigenic polypeptide.

### Treatment of Conditions That Would Benefit From Modulation of T Cell Response

[0522] Methods of administering engineered erythroid cells comprising (e.g., presenting) exogenous polypeptides are described, e.g., in WO2015/073587 and WO2015/153102, each of which is incorporated by reference in its entirety.

[0523] In some embodiments, the engineered erythroid cells or enucleated cells described herein are administered to a subject, e.g., a mammal, e.g., a human. Exemplary mammals that can be treated include without limitation, humans, domestic animals (e.g., dogs, cats and the like), farm animals (e.g., cows, sheep, pigs, horses and the like) and laboratory animals (e.g., monkey, rats, mice, rabbits, guinea pigs and the like). The methods described herein are applicable to both human therapy and veterinary applications. In some embodiments, the engineered erythroid cell is an enucleated cell. In some embodiments, the erythroid cell is a nucleated cell.

[0524] In some embodiments, the erythroid cells are administered to a subject every 1, 2, 3, 4, 5, or 6 months.

[0525] In some embodiments, a dose of erythroid cells comprises about 1×10⁹-2×10⁹, 2×10⁹-5×10⁹, 5×10⁹-1×10¹⁰, 1×10¹⁰-2×10¹⁰, 2×10¹⁰-5×10¹¹, 5×10¹¹-1×10¹¹, 1×10¹¹-2×10¹¹, 2×10¹¹-5×10¹¹, 5×10¹¹-1×10¹², 1×10¹²-2×10¹², 2×10¹²-5×10¹², or 5×10¹²-1×10¹³ cells.

[0526] In some embodiments, the erythroid cells are administered to a subject in a dosing regimen (dose and periodicity of administration) sufficient to maintain function of the administered erythroid cells in the bloodstream of the subject over a period of 2 weeks to a year, e.g., one month to one year or longer, e.g., at least 2 weeks, 4 weeks, 6 weeks, 8 weeks, 3 months, 6 months, a year, 2 years.

[0527] In some embodiments, the engineered erythroid cells or enucleated cells as described herein are administered to a subject in two doses or more (e.g. 2, 3, 4 or more doses). In further embodiments, the engineered erythroid cells or enucleated cells are administered to a subject in two doses or more, wherein the second dose is administered at a time after the first dose when T-cell proliferation is determined to be at a peak. In some embodiments, the engineered erythroid cells or enucleated cells of the disclosure are administered in a first dose, wherein the first dose stimulates T cell proliferation and activation. Following the first dose, the engineered erythroid cells or enucleated cells of the disclosure are administered in a second dose, when T cells are activated and proliferation is at its peak, to stimulate T cell expansion. Without being bound by theory, administering the engineered erythroid cells or enucleated cells of the disclosure in two doses or more, increases the capacity of the engineered erythroid cells or enucleated cells to boost the memory T cell population and thereby provide longer efficacy, e.g., efficacy against a relapse of a tumor or re-challenge with an infectious agent.

[0528] Peak T-cell proliferation can be determined using methods known to the skilled artisan. For example, peak T-cell proliferation can be determined by ³H-thymidine incorporation by proliferating T-cells, or by labelling proliferating T-cells with the fluorescent dye 5,6-carboxyfluorescein diacetate succinimidyl ester (CF SE).

[0529] In some aspects, the present disclosure provides a method of treating a disease or condition described herein, comprising administering to a subject in need thereof a composition described herein that includes an engineered erythroid cell or enucleated cell described herein. In some embodiments, the disease or condition is a cancer. In some embodiments, the disease or condition is an autoimmune disease. In some embodiments, the disease or condition is an autoimmune disease associated with or triggered by an infectious agent. In some embodiments, the disease or condition is an infectious disease.

[0530] In some aspects, the disclosure provides a use of an engineered erythroid cell or enucleated cell described herein for treating a disease or condition described herein, e.g., cancer, an autoimmune disease, such as an autoimmune disease triggered by an infectious agent, or an infectious disease. In some aspects, the disclosure provides a use of an engineered erythroid cell or enucleated cell described herein for manufacture of a medicament for treating a disease or condition described herein, e.g., cancer, an autoimmune disease, such as an autoimmune disease triggered by an infectious agent, or an infectious disease.

[0531] In some embodiments, the engineered erythroid cell or enucleated cell comprises a first exogenous polypeptide comprising an wild-type or loadable exogenous antigen-presenting polypeptide and a second exogenous polypeptide comprising an exogenous antigenic polypeptide, wherein the exogenous antigenic polypeptide comprises or consists of a tumor antigen, an antigen relating to an autoimmune disorder or condition (e..g., an autoimmune disease triggered by an infectious agent), or an antigen relating to an infectious disease or pathogen. In some embodiments, the wild-type or loadable exogenous antigen-presenting polypeptide is bound (e.g., covalently or non-covalently attached) to the exogenous antigenic polypeptide. In some embodiments, the wild-type or loadable exogenous antigen-presenting polypeptide is not bound (e.g., covalently or non-covalently attached) to the exogenous antigenic polypeptide (e.g., are two independent polypeptides). In some embodiments, the wild-type or loadable exogenous antigen-presenting polypeptide and the second exogenous polypeptide are part of a single chain fusion polypeptide. In some embodiments, the engineered erythroid cell or enucleated cell further comprises a third exogenous polypeptide (e.g., an exogenous polypeptide comprising at least one costimulatory polypeptide, at least one coinhibitory polypeptide, or at least one Treg expansion polypeptide as disclosed herein). In some embodiments, the engineered erythroid cell or enucleated cell further comprises a fourth exogenous polypeptide (e.g., an exogenous polypeptide comprising at least one costimulatory polypeptide, at least one coinhibitory polypeptide, or at least one Treg expansion polypeptide as disclosed herein). In some embodiments, the engineered erythroid cell or enucleated cell further comprises a fifth exogenous polypeptide (e.g., an exogenous polypeptide comprising at least one costimulatory polypeptide, at least one coinhibitory polypeptide, or at least one Treg expansion polypeptide as disclosed herein).

[0532] In some embodiments of the foregoing methods, a subject can be administered two different populations of engineered erythroid cells or enucleated cells. For example, a first population of engineered erythroid cells or enucleated cells can include an exogenous polypeptide comprising at least one costimulatory polypeptide, at least one coinhibitory polypeptide, or at least one Treg expansion polypeptide, and a second population of engineered erythroid cells or enucleated cells can include the wild-type or loadable exogenous antigen-presenting polypeptide and the exogenous antigenic polypeptide. In such embodiments, the two distinct populations of engineered erythroid cells or enucleated cells can be administered to a subject, e.g., sequentially or simultaneously.

[0533] In some embodiments, the effect of a first and a second exogenous polypeptide on an engineered erythroid cell or enucleated cell, or a first, a second, and a third exogenous polypeptide on an engineered erythroid cell or enucleated cell administered to a subject is synergistic. The term “synergistic” or “synergy” means a more than additive effect of a combination of two or more agents (e.g., polypeptides that are part of an engineered erythroid cell) compared to their individual effects. In certain embodiments, synergistic activity is a more-than-additive effect of administration to a subject of an engineered erythroid cell or enucleated cell comprising a first polypeptide and a second polypeptide, as compared to the effect of administration of two distinct engineered erythroid cells or enucleated cells (e.g., a first engineered erythroid cell or enucleated cell comprising the first polypeptide and a second engineered erythroid cell or enucleated cell comprising the second polypeptide). In some embodiments, synergistic activity is present when a first agent produces a detectable level of an output X, a second agent produces a detectable level of the output X, and the first and second agents together produce a more-than-additive level of the output X.

[0534] In some embodiments, at least one engineered erythroid cell or enucleated cell is administered to a subject (e.g., a mammal, e.g., a human) wherein the at least one engineered erythroid cell or enucleated cell comprises a Signal 1 on the cell surface, e.g., comprises a wild-type or loadable exogenous antigen-presenting polypeptide, wherein the wild-type or loadable exogenous antigen-presenting polypeptide comprises a bound exogenous antigenic polypeptide. In some embodiments, the at least one engineered erythroid cell or enucleated cell further comprises a Signal 2 and/or Signal 3 on the cell surface, e.g., further comprises an exogenous polypeptide comprising a Signal 2 polypeptide selected from the Signal 2 polypeptides set forth in Table 11 (e.g., 4-1BBL) and/or an exogenous polypeptide comprising a Signal 3 polypeptide selected from the Signal 3 polypeptides set forth in Table 11 (e.g., IL-12). In some embodiments, the at least one engineered erythroid cell or enucleated cell further comprises an exogenous polypeptide comprising 4-1BBL (Signal 2) and/or an exogenous polypeptide comprising IL-12 (Signal 3).

[0535] In some embodiments, two or more (e.g., two, three, four, or more) different engineered erythroid cells or enucleated cells (or populations thereof) are administered to a subject (e.g., a mammal, e.g., a human), wherein the first engineered erythroid cell or enucleated cell (or population thereof) comprises a Signal 1 on the cell surface (e.g., comprises a wild-type or loadable exogenous antigen-presenting polypeptide that is bound to an exogenous antigenic polypeptide), and the second engineered erythroid cell or enucleated cell (or population thereof) comprises a Signal 2 and/or a Signal 3 on the cell surface. For example, in some embodiments, the second engineered erythroid cell or enucleated cell (or population thereof) comprises an exogenous polypeptide comprising a Signal 2 polypeptide selected from the Signal 2 polypeptides set forth in Table 11 (e.g., 4-1BBL) and/or an exogenous polypeptide comprising a Signal 3 polypeptide selected from the Signal 3 polypeptides set forth in Table 11 (e.g., IL-12). In some embodiments, the second engineered erythroid cell or enucleated cell (or population thereof) comprises an exogenous polypeptide comprising 4-1BBL (Signal 2) and/or an exogenous polypeptide comprising IL-12 (Signal 3).

[0536] In some embodiments, three or more different engineered erythroid cells or enucleated cells (or populations thereof) are administered to a subject (e.g., a mammal, e.g., a human) wherein the first the engineered erythroid cell or enucleated cell comprises a Signal 1 on the cell surface (e.g., comprises a wild-type or loadable exogenous antigen-presenting polypeptide that is bound to an exogenous antigenic polypeptide), the second engineered erythroid cell or enucleated cell (or population thereof) comprises a Signal 2 on the cell surface (e.g., comprises an exogenous polypeptide comprising a Signal 2 polypeptide selected from the Signal 2 polypeptides set forth in Table 11 (e.g., 4-1BBL)), and the third engineered erythroid cell or enucleated cell (or population thereof) comprises a Signal 3 on the cell surface (e.g., comprises an exogenous polypeptide comprising a Signal 3 polypeptide selected from the Signal 3 polypeptides set forth in Table 11 (e.g., IL-12)).

[0537] In some embodiments, the Signal 1, Signal 2 or Signal 3 polypeptides are selected from the polypeptides set forth in Table 11.

[0538] In some embodiments, the two, three or more different engineered erythroid cells or enucleated cells (or populations thereof) are administered to a subject sequentially. In some embodiments, the two, three or more different engineered erythroid cells or enucleated cells (or populations thereof) are administered to a subject simultaneously.

[0539] Cancer

[0540] The engineered erythroid cells or enucleated cells provided herein may be used for the treatment of a cancer in a subject in need thereof. Accordingly, in some aspects, the disclosure provides a method of treating a subject having cancer, comprising administering to the subject an effective number or amount of the engineered erythroid cells or enucleated cells described herein to the subject, thereby treating the cancer.

[0541] In some embodiments, provided herein are methods of treating a cancer in a subject in need thereof, wherein the method comprises administering to a subject engineered erythroid cells or enucleated cells (or a pharmaceutical composition comprising the cells) , wherein the engineered erythroid cells or enucleated cells comprise a first exogenous polypeptide comprising an wild-type or loadable exogenous antigen-presenting polypeptide and a second exogenous polypeptide comprising an exogenous antigenic polypeptide, wherein the exogenous antigenic polypeptide comprises or consists of a tumor antigen, thereby treating the cancer. In some embodiments, provided herein are methods of treating a cancer in a subject in need thereof, wherein the method comprises administering to a subject engineered erythroid cells or enucleated cells (or a pharmaceutical composition comprising the cells), wherein the engineered erythroid cells or enucleated cells comprise a first exogenous polypeptide comprising an wild-type or loadable exogenous antigen-presenting polypeptide and a second exogenous polypeptide comprising an exogenous antigenic polypeptide, wherein the exogenous antigenic polypeptide comprises or consists of an amino acid sequence set forth in Tables 7 or 8, thereby treating the cancer. In some embodiments, provided herein are methods of treating a cancer in a subject in need thereof, wherein the method comprises administering to a subject engineered erythroid cells or enucleated cells (or a pharmaceutical composition comprising the cells), wherein the engineered erythroid cells or enucleated cells comprise a first exogenous polypeptide comprising an wild-type or loadable exogenous antigen-presenting polypeptide and a second exogenous polypeptide comprising an exogenous antigenic polypeptide, wherein the exogenous antigenic polypeptide comprises or consists a neoantigen polypeptide set forth in Tables 16 and 17, thereby treating the cancer. In some embodiments, the wild-type or loadable exogenous antigen-presenting polypeptide is bound (e.g., covalently or non-covalently attached) to the exogenous antigenic polypeptide. In some embodiments, the wild-type or loadable exogenous antigen-presenting polypeptide is not bound (e.g., covalently or non-covalently attached) to the exogenous antigenic polypeptide (e.g., are two independent polypeptides). In some embodiments, the engineered erythroid cell or enucleated cell further comprises an additional exogenous polypeptide, wherein the additional exogenous polypeptide provided herein (e.g., an exogenous polypeptide comprising at least one costimulatory polypeptide).

[0542] In some embodiments, the engineered erythroid cell or enucleated cell comprises a first exogenous polypeptide comprising a wild-type or loadable exogenous antigen-presenting polypeptide, and the second exogenous polypeptide comprises an exogenous antigenic polypeptide (e.g., comprising a tumor-associated antigen). In some embodiments, the engineered erythroid cell or enucleated cell comprises a first exogenous polypeptide comprising a wild-type or loadable exogenous antigen-presenting polypeptide, a second exogenous polypeptide comprising a first exogenous antigenic polypeptide (e.g., comprising a first tumor-associated antigen), and a third exogenous polypeptide comprises a second exogenous antigenic polypeptide (e.g., comprising a second tumor-associated antigen). The two exogenous antigenic polypeptides antigens may be antigens derived from two different proteins, or they may be derived from the same protein. In some embodiments, the first exogenous antigenic polypeptide or the second exogenous antigenic polypeptide comprises an HPV-E6 antigen. In some embodiments, the first exogenous antigenic polypeptide or the second exogenous antigenic polypeptide comprises an HPV-E7 antigen. In some embodiments, the first exogenous antigenic polypeptide comprises an HPV-E6 antigen and the second exogenous antigenic polypeptide comprises an HPV-E7 antigen.

[0543] It is contemplated in some embodiments that an engineered erythroid cell or enucleated cell that expands and activates antigen specific CD8+ T cells in the tumor (e.g., an engineered erythroid cell or enucleated cell comprising an exogenous antigenic polypeptide bound to an exogenous antigen-presenting polypeptide comprising an HLA class I polypeptide) can be administered with an engineered erythroid cell or enucleated cell that activates CD4+ T cells (e.g., an engineered erythroid cell or enucleated cell comprising an exogenous antigenic polypeptide bound to an exogenous antigen-presenting polypeptide comprising an HLA class II polypeptide), which activates both antigen-specific and naive CD8+ T-cells in the tumor and lymph nodes, thereby potentiating a robust anti-tumor response. In some embodiments, an engineered erythroid cell or enucleated cell that expands and activates antigen specific CD8+ T cells in the tumor can be administered with an engineered erythroid cell or enucleated cell that activates CD4+ T cells, which activates both antigen-specific and naïve CD8+ T-cells in the tumor and lymph nodes, thereby synergistically increasing the robustness of the immune response.

[0544] In some embodiments, a first engineered erythroid cell or enucleated cell that comprises a first wild-type or loadable exogenous antigen-presenting polypeptide (e.g., comprising an HLA class I or HLA class II polypeptide) and a second exogenous polypeptide comprising an exogenous antigenic polypeptide (e.g., comprising a first tumor-associated antigen) as a single chain fusion polypeptide can be administered to a subject together with a second engineered erythroid cell or enucleated cell that comprises a second wild-type or loadable exogenous antigen-presenting polypeptide (e.g., comprising an HLA class I or HLA class II polypeptide) and a second exogenous polypeptide comprising an exogenous antigenic polypeptide (e.g., comprising a second tumor-associated antigen). In some embodiments, the first engineered erythroid cell or enucleated cell comprises a first wild-type or loadable exogenous antigen-presenting polypeptide comprising an HLA class I polypeptide, and the second engineered erythroid cell or enucleated cell comprises a second wild-type or loadable exogenous antigen-presenting polypeptide comprising an HLA class II polypeptide. In some embodiments, the first engineered erythroid cell or enucleated cell and/or the second engineered erythroid cell or enucleated cell comprises an additional exogenous polypeptide (e.g., an exogenous costimulatory polypeptide provided herein). Without being bound by theory, it is believed that administration of cells that mediate MHC I and MHC II tumor antigen presentation (via antigen-presenting polypeptides comprising HLA class I and HLA class II polypeptides, respectively), combined with potent co-stimulation, has the potential to generate sustained tumor-specific killing.

[0545] As will be appreciated by the skilled artisan, in some embodiments the subject may be treated with engineered erythroid cells or enucleated cells comprising multiple, e.g., two, three, four, five or more, different exogenous antigenic polypeptides. In some embodiments, the multiple exogenous antigenic polypeptides are present on the same engineered enucleated erythroid cell. In some embodiments the multiple exogenous antigenic polypeptides are present on two or more distinct engineered enucleated erythroid cells, wherein a combination of the distinct engineered enucleated erythroid cells are administered to the subject to treat the disorder. The two, three, four, five or more exogenous antigenic polypeptides may be each from different proteins, or two or more of the exogenous antigenic polypeptides may be derived from the same protein (e.g., the same tumor antigen or the same neoantigen).

[0546] It is encompassed by the present disclosure that the exogenous antigenic polypeptide may include any tumor antigen, or antigenic-portion thereof, known in the art, including, without limitation, any one or more of the exogenous antigenic polypeptides, or antigenic-portions thereof, listed in Tables 7 and 8. Non-limiting, exemplary specific cancers that can be treated using these exogenous antigenic polypeptides are also described Tables 7-8.

[0547] Multiple cancers may be treated using the methods described herein. The present disclosure is not limited to a certain type of cancer, but rather any cancer is contemplated as being treated by the engineered erythroid cells or enucleated cells described herein. In certain embodiments, the cancer includes, but is not limited to, acute lymphoblastic leukemia (ALL), ACUTE myeloid leukemia (AML), anal cancer, bile duct cancer, bladder cancer, bone cancer, bowel cancer, brain tumors, breast cancer, cancer of unknown primary, cancer spread to bone, cancer spread to brain, cancer spread to liver, cancer spread to lung, carcinoid, cervical cancer, choriocarcinoma, chronic lymphocytic leukemia (CLL), chronic myeloid leukemia (CML), colon cancer, colorectal cancer, endometrial cancer, eye cancer, gallbladder cancer, gastric cancer, gestational trophoblastic tumors (GTT), hairy cell leukaemia, head and neck cancer, Hodgkin lymphoma, kidney cancer, laryngeal cancer, leukaemia, liver cancer, lung cancer, lymphoma, melanoma skin cancer, mesothelioma, men's cancer, molar pregnancy, mouth and oropharyngeal cancer, myeloma, nasal and sinus cancers, nasopharyngeal cancer, non Hodgkin lymphoma (NHL), oesophageal cancer, ovarian cancer, pancreatic cancer, penile cancer, prostate cancer, rare cancers, rectal cancer, salivary gland cancer, secondary cancers, skin cancer (non melanoma), soft tissue sarcoma, stomach cancer, testicular cancer, thyroid cancer, unknown primary cancer, uterine cancer, vaginal cancer, and vulval cancer.

[0548] In certain embodiments, the cancer is a leukemia, e.g. AML or ALL. In other embodiments, the cancer is a hepatic cell carcinoma. In still other embodiments, the cancer is selected from a cervical cancer, head and neck cancer, lymphomas, and kidney clear cell carcinoma.

[0549] A neoantigen is a class of tumor antigens that arises from a tumor-specific mutation(s) which alters the amino acid sequence of genome encoded proteins. A neoantigen can include a polypeptide sequence or a nucleotide sequence. A mutation can include a frameshift or non-frameshift indel (insertion or deletion), missense or nonsense substitution, splice site alteration, genomic rearrangement or gene fusion, or any genomic or expression alteration giving rise to a neoORF. A mutation can also include a splice variant. Post-translational modifications specific to a tumor cell can include aberrant phosphorylation. Post-translational modifications specific to a tumor cell can also include a proteasome-generated spliced antigen (see, e.g., Liepe et al. (2016) Science 354(6310): 354-8). A tumor neoantigen is a neoantigen present in a subject's tumor cell or tissue but not in the subject's corresponding normal cell or tissue.

[0550] Recent analyses of The Cancer Genome Atlas (TCGA) datasets have linked the genomic landscape of tumors with tumor immunity, implicating neoantigen load in driving T cell responses (Brown et al. (2014) Genome Res. 24(5): 743-50) and identifying somatic mutations associated with immune infiltrates (Rutledge et al. (2013) Clin Cancer Res. 19(18): 4951-60). Rooney et al. (2015) 160(1-2): 48-61) suggest that neoantigens and viruses are likely to drive cytolytic activity, and reveal known and novel mutations that enable tumors to resist immune attack.

[0551] In some embodiments, the exogenous antigenic polypeptide included in an engineered erythroid cell or enucleated cell described herein comprises a neoantigen identified from a cancer cell in a subject. In some embodiments, the neoantigen is a shared neoantigen. Methods of identifying neoantigens are known in the art and described, e.g., in U.S. Pat. No. 10,055,540, incorporated by reference in its entirety herein. Neoantigenic polypeptides and shared neoantigenic polypeptides are described, for example, in International Patent Publication No. WO 2016/187508; U.S. Publication No. 20180055922; Schumacher and Hacohen et al. (2016) Curr. Opin. Immunol. 41: 98-103; Gubin et al. (2014) Nature 515(7528): 577-81; Schumacher and Schreiber (2015) Science 348(6230): 69-74, Ott et al. (2017) Nature 547(7662): 217-21; each of which are incorporated by reference in their entireties herein.

[0552] Accordingly, in some embodiments, the exogenous antigenic polypeptide comprises or consists of a neoantigen polypeptide. In some embodiments, the exogenous antigenic polypeptide comprises or consists of a neoantigen polypeptide set forth in The Comprehensive Tumor-Specific Neoantigen Database (TSNAdb v1.0); available at biopharm.zju.edu.cnitsnadb and described in Wu et al. (2018) Genomics Proteomics Bioinformatics 16: 276-82. In some embodiments, the exogenous antigenic polypeptide is a neoantigen polypeptide set forth in U.S. Pat. No. 10,055,540, incorporated by reference in its entirety herein. In some embodiments, the exogenous antigenic polypeptide comprises a neoantigen polypeptide listed in Table 16.

TABLE 16
Neoantigen Polypeptides

| HLA class I | | SEQ ID |
|---|---|---|
| allele | Neoantigen Polypeptide | NO: |
| HLA-A*01:01 | YEMFNDKSF | 932 |
| HLA-A*02:01 | HROEIFSHDFJ | 933 |
| HLA-B*07:02 | FJIEJFOESS | 934 |
| HLA-B*08:01 | NEIOREIREI | 935 |
| HLA-C*01:03 | JFKSIFEMMSJDSSU | 936 |
| HLA-C*01:04 | KNFLENFIESOFI | 937 |

[0553] In some embodiments, the exogenous antigenic polypeptide comprises or consists of a neoantigen polypeptide listed in Table 17. Non-limiting examples of HLA polypeptide alleles which may bind to the neoantigen polypeptides are also described and may be used to design desirable wild-type or loadable antigen-presenting polypeptides for use with the specified neoantigen polypeptides.

TABLE 17
Neoantigen Polypeptides

| | | | SEQ |
|---|---|---|---|
| Genetic | | Neoantigen | ID |
| Mutation | Allele(s) | polypeptide | NO: |
| BRAF V600E | HLA-A*3:01; HLA-A*11:01 | KIGDFGLATEK | 938 |
| BRAF V600E | HLA-B*57:01 | FGLATEKSRW | 939 |
| BRAF V600E | HLA-C*12:03; HLA-C*03:03 | ATEKSRWSG | 940 |
| BRAF V600E | HLA-A*24:02; HLA-C*12:03; | DFGLATEK | 941 |
| | HLA-C*07:02 | | |
| BRAF V600E | HLA-C*03:03; HLA-C*12:03 | EKSRWSGSH | 942 |
| BRAF V600E | HLA-C*03:03; HLA-C*12:03; | FGLATEKSR | 248 |
| | HLA-C*07:02 | | |
| BRAF V600E | HLA-C*12:03; HLA-C*03:03; | GDFGLATEK | 249 |
| | HLA-A*11:01 | | |
| BRAF V600E | HLA-A*31:01 | GDFGLATEKSR | 943 |
| BRAF V600E | HLA-C*12:03; HLA-C*03:03 | GLATEKSRW | 944 |
| BRAF V600E | HLA-C*12:03; HLA-C*05:01; | IGDFGLATE | 945 |
| | HLA-C*08:02 | | |
| BRAF V600E | HLA-B*08:01; HLA-B*57:01 | LATEKSRW | 946 |
| BRAF V600E | HLA-C*03:03; HLA-C*12:03; | LATEKSRWS | 246 |
| | HLA-C*07:01 | | |
| BRAF V600E | HLA-B*18:01; HLA-C*12:03; | TEKSRWSG | 947 |
| | HLA-C*03:03 | | |
| BRAF V600M | HLA-C*12:03; HLA-C*03:03; | ATMKSRWSG | 948 |
| | HLA-A*30:01; HLA-C*15:02 | | |
| BRAF V600M | HLA-A*24:02 | DFGLATMK | 949 |
| BRAF V600M | HLA-C*12:03; HLA-C*07:02; | DFGLATMKS | 950 |
| | HLA-C*03:03 | | |
| BRAF V600M | HLA-A*02:01 | FGLATMKS | 951 |
| BRAF V600M | HLA-C*03:03; HLA-C*12:03; | FGLATMKSR | 952 |
| | HLA-C*07:02 | | |
| BRAF V600M | HLA-C*12:03; HLA-C*03:03; | GDFGLATMK | 953 |
| | HLA-A*11:01 | | |
| BRAF V600M | HLA-A*31:01 | GDFGLATMKSR | 954 |
| BRAF V600M | HLA-C*12:03; HLA-C*03:03 | GLATMKSRW | 955 |
| BRAF V600M | HLA-C*12:03; HLA-C*05:01; | IGDFGLATM | 956 |
| | HLA-C*08:02; HLA-C*16:01; | | |
| | HLA-C*07:02; HLA-C*03:03; | | |
| | HLA-C*03:04; HLA-B*35:01 | | |
| BRAF V600M | HLA-B*08:01 | LATMKSRW | 957 |
| BRAF V600M | HLA-C*03:03; HLA-C*12:03; | LATMKSRWS | 958 |
| | HLA-C*07:01 | | |
| BRAF V600M | HLA-C*12:03; HLA-C*03:03 | MKSRWSGSH | 959 |
| BRAF V600M | HLA-B*08:01 | TMKSRWSG | 960 |
| BRAF V600M | HLA-C*12:03; HLA-C*03:03 | TMKSRWSGS | 961 |
| BRAF V600M | HLA-B*15:01; HLA-B*08:01 | TMKSRWSGSH | 962 |
| EGFR A289V | HLA-C*12:03; HLA-C*03:03 | EGKYSFGVT | 963 |
| EGFR A289V | HLA-A*68:01; HLA-A*11:01 | EGKYSFGVTCVK | 964 |
| EGFR A289V | HLA-A*68:01; HLA-A*11:01 | EGKYSFGVTCVKK | 965 |
| EGFR A289V | HLA-C*03:03; HLA-C*12:03; | FGVTCVKKC | 966 |
| | HLA-C*07:02 | | |
| EGFR A289V | HLA-A*31:01 | FGVTCVKKCPR | 967 |
| EGFR A289V | HLA-C*12:03; HLA-C*03:03; | GKYSFGVTC | 968 |
| | HLA-C*07:02 | | |
| EGFR A289V | HLA-A*11:01 | GKYSFGVTCVK | 969 |
| EGFR A289V | HLA-A*68:01; HLA-A*11:01 | GKYSFGVTCVKK | 970 |
| EGFR A289V | HLA-C*12:03; HLA-C*03:03 | GVTCVKKCP | 971 |
| EGFR A289V | HLA-A*68:01; HLA-A*31:01 | GVTCVKKCPR | 972 |
| EGFR A289V | HLA-C*12:03; HLA-C*03:03; | KYSFGVTCV | 973 |
| | HLA-C*07:02 | | |
| EGFR A289V | HLA-A*03:01; HLA-A*68:01; | KYSFGVTCVK | 974 |
| | HLA-A*11:01; HLA-A*30:01; | | |
| | HLA-A*31:01 | | |
| EGFR A289V | HLA-A*68:01; HLA-A*11:01 | KYSFGVTCVKK | 975 |
| EGFR A289V | HLA-A*31:01; HLA-A*68:01 | KYSFGVTCVKKCPR | 976 |
| EGFR A289V | HLA-B*18:01; HLA-A*24:02 | PEGKYSFG | 977 |
| EGFR A289V | HLA-C*12:03 | PEGKYSFGV | 978 |
| EGFR A289V | HLA-A*68:01; HLA-A*11:01 | PEGKYSFGVTCVK | 979 |
| EGFR A289V | HLA-A*68:01; HLA-A*11:01 | PEGKYSFGVTCVKK | 980 |
| EGFR A289V | HLA-C*12:03; HLA-C*07:02; | SFGVTCVKK | 981 |
| | HLA-C*03:03 | | |
| EGFR A289V | HLA-A*31:01 | SFGVTCVKKCPR | 982 |
| EGFR A289V | HLA-A*31:01; HLA-B*08:01 | TCVKKCPR | 983 |
| EGFR A289V | HLA-A*31:01; HLA-C*03:03; | VTCVKKCPR | 984 |
| | HLA-C*12:03; HLA-A*68:01 | | |
| EGFR A289V | HLA-A*68:01; HLA-C*12:03; | YSFGVTCVK | 985 |
| | HLA-A*11:01; HLA-C*07:01; | | |
| | HLA-C*15:02; HLA-C*03:03; | | |
| | HLA-A*03:01; HLA-A*30:01; | | |
| | HLA-C*07:02 | | |
| EGFR A289V | HLA-A*68:01; HLA-A*11:01; | YSFGVTCVKK | 986 |
| | HLA-A*03:01 | | |
| EGFR A289V | HLA-A*68:01; HLA-A*31:01 | YSFGVTCVKKCPR | 987 |
| EGFR G598V | HLA-C*03:03; HLA-C*12:03; | AVVMGENNT | 988 |
| | HLA-C*05:01 | | |
| EGFR G598V | HLA-B*15:01 | AVVMGENNTL | 989 |
| EGFR G598V | HLA-C*12:03; HLA-C*03:03; | CPAVVMGEN | 990 |
| | HLA-B*35:01 | | |
| EGFR G598V | HLA-C*12:03; HLA-C*15:02; | CVKTCPAVV | 991 |
| | HLA-C*05:01; HLA-C*03:03 | | |
| EGFR G598V | HLA-B*15:01 | CVKTCPAVVM | 992 |
| EGFR G598V | HLA-C*12:03; HLA-C*03:03 | HCVKTCPAV | 993 |
| EGFR G598V | HLA-C*12:03; HLA-C*07:02; | KTCPAVVMG | 994 |
| | HLA-C*03:03; HLA-A*30:01 | | |
| EGFR G598V | HLA-C*12:03; HLA-C*03:03; | PAVVMGENN | 995 |
| | HLA-C*15:02 | | |
| EGFR G598V | HLA-C*12:03 | TCPAVVMGE | 996 |
| EGFR G598V | HLA-C*03:03; HLA-C*12:03; | VKTCPAVVM | 997 |
| | HLA-C*07:02 | | |
| EGFR G598V | HLA-C*03:04; HLA-C*12:03; | VVMGENNTL | 998 |
| | HLA-C*03:03; HLA-C*16:01; | | |
| | HLA-C*07:02; HLA-C*15:02; | | |
| | HLA-C*06:02; HLA-C*07:01 | | |
| EGFR L858R | HLA-A*24:02 | DFGRAKLL | 999 |
| EGFR L858R | HLA-C*12:03; HLA-C*03:03 | DFGRAKLLG | 1000 |
| EGFR L858R | HLA-B*08:01 | FGRAKLLG | 1001 |
| EGFR L858R | HLA-C*12:03; HLA-A*30:01 | FGRAKLLGA | 1002 |
| EGFR L858R | HLA-C*12:03; HLA-C*03:03; | GRAKLLGAE | 1003 |
| | HLA-C*07:02 | | |
| EGFR L858R | HLA-C*12:03; HLA-A*31:01; | HVKITDFGR | 1004 |
| | HLA-A*68:01; HLA-C*07:02; | | |
| | HLA-A*30:01; HLA-C*03:03 | | |
| EGFR L858R | HLA-C*12:03; HLA-C*05:01; | ITDFGRAKL | 1005 |
| | HLA-C*08:02; HLA-C*16:01; | | |
| | HLA-C*03:03 | | |
| EGFR L858R | HLA-C*12:03; HLA-C*03:03; | KITDFGRAK | 1006 |
| | HLA-A*30:01; HLA-A*11:01; | | |
| | HLA-A*03:01; HLA-C*07:02; | | |
| | HLA-A*31:01 | | |
| EGFR L858R | HLA-C*12:03; HLA-C*03:03; | RAKLLGAEE | 1007 |
| | HLA-C*15:02 | | |
| EGFR L858R | HLA-C*03:03; HLA-C*12:03; | TDFGRAKLL | 1008 |
| | HLA-C*07:01 | | |
| EGFR L858R | HLA-C*12:03; HLA-C*03:03 | VKITDFGRA | 1009 |
| ERBB2 S310F | HLA-A*24:02 | DVGFCTLV | 1010 |
| ERBB2 S310F | HLA-C*12:03; HLA-C*05:01 | DVGFCTLVC | 1011 |
| ERBB2 S310F | HLA-C*03:03; HLA-C*12:03; | FCTLVCPLH | 1012 |
| | HLA-C*08:02; HLA-C*07:02; | | |
| ERBB2 S310F | HLA-C*03:03; HLA-C*12:03; | GFCTLVCPL | 1013 |
| | HLA-C*07:02 | | |
| ERBB2 S310F | HLA-C*12:03; HLA-C*03:03; | LSTDVGFCT | 1014 |
| | HLA-C*15:02 | | |
| ERBB2 S310F | HLA-C*07:02; HLA-C*03:03; | NYLSTDVGF | 1015 |
| | HLA-C*12:03; HLA-A*24:02 | | |
| ERBB2 S310F | HLA-A*02:01 | NYLSTDVGFCTLV | 1016 |
| ERBB2 S310F | HLA-A*02:01 | NYLSTDVGFCTLVC | 1017 |
| ERBB2 S310F | HLA-C*12:03; HLA-C*05:01; | STDVGFCTL | 1018 |
| | HLA-C*16:01; HLA-C*15:02; | | |
| | HLA-C*03:04; HLA-C*03:03; | | |
| | HLA-A*32:01 | | |
| ERBB2 S310F | HLA-A*01:01 | STDVGFCTLV | 1019 |
| ERBB2 S310F | HLA-C*12:03; HLA-C*03:03 | TDVGFCTLV | 1020 |
| ERBB2 S310F | HLA-C*12:03; HLA-C*03:03; | VGFCTLVCP | 1021 |
| | HLA-C*07:02 | | |
| ERBB2 S310F | HLA-B*40:01 | VGFCTLVCPL | 1022 |
| ERBB2 S310F | HLA-C*03:03; HLA-C*12:03; | YLSTDVGFC | 1023 |
| | HLA-C*05:01; HLA-A*02:01 | | |
| ERBB2 S310F | HLA-A*02:01 | YLSTDVGFCT | 1024 |
| ERBB2 S310F | HLA-A*02:01 | YLSTDVGFCTLV | 1025 |
| ERBB2 S310F | HLA-A*02:01 | YLSTDVGFCTLVC | 1026 |
| ERBB2 S310F | HLA-A*02:01 | YLSTDVGFCTLVCP | 1027 |
| FBXW7 R465C | HLA-C*12:03; HLA-A*31:01 | CCMHLHEKR | 1028 |
| FBXW7 R465C | HLA-A*31:01 | CMHLHEKR | 1029 |
| FBXW7 R465C | HLA-C*03:03; HLA-C*12:03; | GHTSTVCCM | 1030 |
| | HLA-C*07:02 | | |
| FBXW7 R465C | HLA-A*11:01; HLA-A*68:01 | GHTSTVCCMHLHEK | 1031 |
| FBXW7 R465C | HLA-C*12:03; HLA-C*03:03; | HTSTVCCMH | 1032 |
| | HLA-C*15:02; HLA-A*68:01; | | |
| | HLA-C*05:01; HLA-C*07:02; | | |
| FBXW7 R465C | HLA-A*11:01; HLA-A*68:01 | HTSTVCCMHLHEK | 1033 |
| FBXW7 R465C | HLA-A*68:01; HLA-A*31:01 | HTSTVCCMHLHEKR | 1034 |
| FBXW7 R465C | HLA-C*12:03; HLA-C*03:03 | LYGHTSTVC | 1035 |
| FBXW7 R465C | HLA-B*35:01 | LYGHTSTVCCM | 1036 |
| FBXW7 R465C | HLA-C*12:03; HLA-C*03:03; | STVCCMHLH | 1037 |
| | HLA-C*15:02 | | |
| FBXW7 R465C | HLA-A*11:01 | STVCCMHLHEK | 1038 |
| FBXW7 R465C | HLA-A*31:01; HLA-A*68:01; | STVCCMHLHEKR | 1039 |
| | HLA-A*11:01 | | |
| FBXW7 R465C | HLA-C*03:03; HLA-C*12:03; | TSTVCCMHL | 1040 |
| | HLA-C*15:02; HLA-C*07:01; | | |
| | HLA-C*07:02 | | |
| FBXW7 R465C | HLA-A*11:01 | TSTVCCMHLHEK | 1041 |
| FBXW7 R465C | HLA-A*31:01; HLA-A*68:01 | TSTVCCMHLHEKR | 1042 |
| FBXW7 R465C | HLA-C*12:03; HLA-C*03:03 | TVCCMHLHE | 1043 |
| FBXW7 R465C | HLA-A*11:01; HLA-A*68:01; | TVCCMHLHEK | 1044 |
| | HLA-A*03:01; HLA-C*12:03; | | |
| | HLA-C*03:03 | | |
| FBXW7 R465C | HLA-A*31:01 | VCCMHLHEKR | 1045 |
| FBXW7 R465C | HLA-C*03:03; HLA-C*12:03; | YGHTSTVCC | 1046 |
| | HLA-C*07:02 | | |
| FBXW7 R465C | HLA-B*15:01 | YGHTSTVCCM | 1047 |
| FGFR3 S249C | HLA-C*12:03; HLA-C*03:03 | CPHRPILQA | 1048 |
| FGFR3 S249C | HLA-C*12:03; HLA-C*03:03; | DVLERCPHR | 1049 |
| | HLA-C*07:02; HLA-A*68:01; | | |
| | HLA-A*31:01 | | |
| FGFR3 S249C | HLA-A*02:01 | DVLERCPHRPI | 1050 |
| FGFR3 S249C | HLA-C*07:02; HLA-C*06:02; | ERCPHRPIL | 1051 |
| | HLA-C*07:01; HLA-C*03:03; | | |
| | HLA-C*12:03 | | |
| FGFR3 S249C | HLA-C*03:03; HLA-C*12:03 | LDVLERCPH | 1052 |
| FGFR3 S249C | HLA-C*12:03; HLA-B*40:01; | LERCPHRPI | 1053 |
| | HLA-C*03:03; HLA-B*44:02 | | |
| FGFR3 S249C | HLA-B*40:01 | LERCPHRPIL | 1054 |
| FGFR3 S249C | HLA-C*12:03 | RCPHRPILQ | 1055 |
| FGFR3 S249C | HLA-B*07:02 | RCPHRPILQA | 1056 |
| FGFR3 S249C | HLA-C*12:03; HLA-C*05:01; | TLDVLERCP | 1057 |
| | HLA-C*07:02; HLA-C*07:01 | | |
| FGFR3 S249C | HLA-C*12:03; HLA-C*03:03 | VLERCPHRP | 1058 |
| FGFR3 S249C | HLA-C*12:03; HLA-C*03:03; | YTLDVLERC | 1059 |
| | HLA-C*15:02 | | |
| FGFR3 S249C | HLA-A*68:01 | YTLDVLERCPHR | 1060 |
| FLT3 D835Y | HLA-C*12:03; HLA-C*03:03; | ARYIMSDSN | 1061 |
| | HLA-C*07:01; HLA-C*07:02 | | |
| FLT3 D835Y | HLA-B*15:01; HLA-B*27:05; | ARYIMSDSNY | 1062 |
| | HLA-A*29:02 | | |
| FLT3 D835Y | HLA-A*02:01 | ARYIMSDSNYV | 1063 |
| FLT3 D835Y | HLA-C*12:03; HLA-C*03:03; | CDFGLARYI | 1064 |
| | HLA-C*07:01; HLA-B*13:02; | | |
| | HLA-C*15:02 | | |
| FLT3 D835Y | HLA-B*15:01 | CDFGLARYIM | 1065 |
| FLT3 D835Y | HLA-A*24:02 | DFGLARYI | 1066 |
| FLT3 D835Y | HLA-C*12:03; HLA-C*07:02; | DFGLARYM | 1067 |
| | HLA-C*03:03; HLA-B*18:01; | | |
| FLT3 D835Y | HLA-B*08:01 | FGLARYIM | 1068 |
| FLT3 D835Y | HLA-C*03:03; HLA-C*12:03; | FGLARYIMS | 1069 |
| | HLA-C*07:02 | | |
| FLT3 D835Y | HLA-B*15:01 | FGLARYIMSD | 1070 |
| FLT3 D835Y | HLA-A*02:01 | FGLARYIMSDSNYV | 1071 |
| FLT3 D835Y | HLA-A*02:01 | GLARYIMS | 1072 |
| FLT3 D835Y | HLA-C*03:03; HLA-C*12:03 | GLARYIMSD | 1073 |
| FLT3 D835Y | HLA-A*02:01 | GLARYIMSDSNYV | 1074 |
| FLT3 D835Y | HLA-C*12:03; HLA-C*05:01; | ICDFGLARY | 1075 |
| | HLA-C*08:02; HLA-A*01:01 | | |
| FLT3 D835Y | HLA-A*02:01 | IMSDSNYV | 1076 |
| FLT3 D835Y | HLA-C*12:03; HLA-C*03:03 | LARYIMSDS | 1077 |
| FLT3 D835Y | HLA-A*02:01 | LARYIMSDSNYV | 1078 |
| FLT3 D835Y | HLA-C*12:03; HLA-C*03:03; | RYIMSDSNY | 1079 |
| | HLA-A*29:02; HLA-C*07:02 | | |
| FLT3 D835Y | HLA-A*02:01; HLA-A*24:02; | RYIMSDSNYV | 1080 |
| | HLA-B*15:01 | | |
| FLT3 D835Y | HLA-A*02:01; HLA-C*15:02; | YIMSDSNYV | 1081 |
| | HLA-C*12:03; HLA-C*03:04; | | |
| | HLA-C*02:02; HLA-C*16:01; | | |
| | HLA-C*06:02; HLA-C*07:01; | | |
| | HLA-C*03:03 | | |
| GNA11 Q209L | HLA-A*24:02 | DVGGLRSE | 1082 |
| GNA11 Q209L | HLA-C*12:03; HLA-A*68:01; | DVGGLRSER | 1083 |
| | HLA-C*03:03; HLA-C*07:02 | | |
| GNA11 Q209L | HLA-A*68:01; HLA-A*31:01 | DVGGLRSERR | 1084 |
| GNA11 Q209L | HLA-A*11:01 | DVGGLRSERRK | 1085 |
| GNA11 Q209L | HLA-C*06:02; HLA-C*07:01; | FRMVDVGGL | 1086 |
| | HLA-C*07:02; HLA-B*27:05; | | |
| | HLA-C*03:03; HLA-C*12:03; | | |
| | HLA-C*08:02 | | |
| GNA11 Q209L | HLA-A*68:01; HLA-B*27:05; | FRMVDVGGLR | 1087 |
| | HLA-A*31:01 | | |
| GNA11 Q209L | HLA-A*31:01; HLA-B*27:05 | FRMVDVGGLRSER | 1088 |
| GNA11 Q209L | HLA-A*31:01; HLA-B*27:05 | FRMVDVGGLRSWRR | 1089 |
| GNA11 Q209L | HLA-C*03:03; HLA-C*12:03 | GGLRSERRK | 1090 |
| | HLA-C*07:02 | | |
| GNA11 Q209L | HLA-C*06:02; HLA-C*07:01; | LRSERRKWI | 1092 |
| | HLA-C*12:03; HLA-C*03:03; | | |
| | HLA-C*07:02; HLA-B*27:05 | | |
| GNA11 Q209L | HLA-C*05:01; HLA-C*12:03; | MVDVGGLRS | 1093 |
| | HLA-C*07:01; HLA-C*08:02 | | |
| GNA11 Q209L | HLA-B*15:01 | MVDVGGLRS | 1094 |
| GNA11 Q209L | HLA-A*31:01; HLA-C*12:03; | RMVDVGGLR | 1095 |
| | HLA-C*03:03; HLA-A*68:01; | | |
| | HLA-A*03:01 | | |
| GNA11 Q209L | HLA-A*31:01 | RMVDVGGLRSER | 1096 |
| GNA11 Q209L | HLA-A*31:01 | RMVDVGGLRSERR | 1097 |
| GNA11 Q209L | HLA-A*03:01 | RMVDVGGLRSERRK | 1098 |
| GNA11 Q209L | HLA-C*12:03; HLA-C*03:03; | VDVGGLRSE | 1099 |
| | HLA-C*07:02 | | |
| GNA11 Q209L | HLA-A*11:01; HLA-A*31:01 | VDVGGLRSERR | 1100 |
| GNA11 Q209L | HLA-C*12:03; HLA-C*03:03; | VGGLRSERR | 1101 |
| | HLA-C*07:02; HLA-C*07:01 | | |
| GNAQ Q209P | HLA-C*12:03; HLA-C*03:03; | DVGGPRSER | 1102 |
| | HLA-A*68:01; HLA-C*07:02; | | |
| | HLA-C*07:01 | | |
| GNAQ Q209P | HLA-A*68:01 | DVGGPRSERR | 1103 |
| GNAQ Q209P | HLA-A*11:01 | DVGGPRSERRK | 1104 |
| GNAQ Q209P | HLA-C*07:01; HLA-C*06:02; | FRMVDVGGP | 1105 |
| | HLA-C*12:03; HLA-C*07:02; | | |
| | HLA-C*03:03 | | |
| GNAQ Q209P | HLA-B*27:05; HLA-A*68:01; | FRMVDVGGPR | 1106 |
| | HLA-A*31:01 | | |
| GNAQ Q209P | HLA-B*27:05 | FRMVDVGGPRS | 1107 |
| GNAQ Q209P | HLA-B*27:05 | FRMVDVGGPRSE | 1108 |
| GNAQ Q209P | HLA-A*31:01; HLA-B*27:05 | FRMVDVGGPRSER | 1109 |
| GNAQ Q209P | HLA-A*31:01; HLA-B*27:05 | FRMVDVGGPRSERR | 1110 |
| GNAQ Q209P | HLA-C*12:03; HLA-C*07:02 | GGPRSERRK | 1111 |
| GNAQ Q209P | HLA-C*12:03; HLA-B*07:02 | GPRSERRKW | 1112 |
| GNAQ Q209P | HLA-B*07:02 | GPRSERRKWI | 1113 |
| GNAQ Q209P | HLA-C*12:03; HLA-C*05:01; | MVDVGGPRS | 1114 |
| | HLA-C*07:01; HLA-C*08:02 | | |
| GNAQ Q209P | HLA-B*15:01 | MVDVGGPRSE | 1115 |
| GNAQ Q209P | HLA-C*06:02; HLA-C*07:01; | PRSERRKWI | 1116 |
| | HLA-C*12:03; HLA-C*03:03; | | |
| | HLA-C*07:02 | | |
| GNAQ Q209P | HLA-A*31:01; HLA-C*12:03; | RMVDVGGPR | 1117 |
| | HLA-C*03:03 | | |
| GNAQ Q209P | HLA-A*31:01 | RMVDVGGPRSER | 1118 |
| GNAQ Q209P | HLA-A*31:01 | RMVDVGGPRSERR | 1119 |
| GNAQ Q209P | HLA-C*03:03; HLA-C*12:03; | VDVGGPRSE | 1120 |
| | HLA-C*07:02 | | |
| GNAQ Q209P | HLA-A*11:01; HLA-A*31:01 | VDVGGPRSERR | 1121 |
| GNAQ Q209P | HLA-C*12:03; HLA-C*07:02; | VGGPRSERR | 1122 |
| | HLA-C*03:03; HLA-C*07:01 | | |
| H3F3A K27M | HLA-A*02:01 | RMSAPSTGGV | 1123 |
| HRAS Q61R | HLA-C*12:03; HLA-C*07:02; | AGREEYSAM | 1124 |
| | HLA-C*16:01; HLA-C*03:03 | | |
| HRAS Q61R | HLA-A*31:01 | AGREEYSAMR | 1125 |
| HRAS Q61R | HLA-C*12:03; HLA-C*03:03; | DILDTAGRE | 1126 |
| | HLA-C*15:02 | | |
| HRAS Q61R | HLA-A*29:02 | DILDTAGREEY | 1127 |
| HRAS Q61R | HLA-B*18:01 | DTAGREEY | 1128 |
| HRAS Q61R | HLA-C*03:03; HLA-C*12:03; | DTAGREEYS | 1129 |
| | HLA-C*07:01 | | |
| HRAS Q61R | HLA-A*26:01 | DTAGREEYSAM | 1130 |
| HRAS Q61R | HLA-A*68:01; HLA-A*26:01 | DTAGREEYSAMR | 1131 |
| HRAS Q61R | HLA-A*26:01 | DTAGREEYSAMRD | 1132 |
| HRAS Q61R | HLA-B*18:01 | EEYSAMRD | 1133 |
| HRAS Q61R | HLA-C*07:01; HLA-C*12:03; | GREEYSAMR | 1134 |
| | HLA-C*07:02; HLA-C*05:01; | | |
| | HLA-C*03:03 | | |
| HRAS Q61R | HLA*B*27:05 | GREEYSAMRD | 1135 |
| HRAS Q61R | HLA-C*12:03; HLA-C*05:01; | ILDTAGREE | 1136 |
| | HLA-C*08:02; HLA-C*07:01; | | |
| | HLA-C*03:03 | | |
| HRAS Q61R | HLA-B*15:01; HLA-A*01:01; | ILDTAGREEY | 230 |
| | HLA-A*29:02 | | |
| HRAS Q61R | HLA-A*68:01 | ILDTAGREEYSAMR | 1137 |
| HRAS Q61R | HLA-C*12:03; HLA-C*03:03; | LDILDTAGR | 1138 |
| | HLA-A*68:01 | | |
| HRAS Q61R | HLA-C*03:03; HLA-C*12:03; | LDTAGREEY | 1139 |
| | HLA-B*35:01 | | |
| HRAS Q61R | HLA-A*68:01 | LDTAGREEYSAMR | 1140 |
| HRAS Q61R | HLA-C*12:03; HLA-C*03:03; | REEYSAMRD | 1141 |
| | HLA-C*05:01 | | |
| HRAS Q61R | HLA-A*02:01 | TAGREEYS | 1142 |
| HRAS Q61R | HLA-C*12:03; HLA-C*03:03 | TAGREEYSA | 1143 |
| IDH1 R132H | HLA-C*12:03; HLA-C*03:03; | GHHAYGDQY | 1144 |
| | HLA-A*29:02; HLA-C*07:02 | | |
| IRH1 R132H | HLA-A*31:01; HLA-A*68:01 | GHHAYGDQYR | 1145 |
| IDH1 R132H | HLA-C*03:03; HLA-C*12:03; | HHAYGDQYR | 1146 |
| | HLA-A*68:01; HLA-C*07:02 | | |
| IDH1 R132H | HLA-C*03:03; HLA-C*12:03; | IGHHAYGDQ | 1147 |
| | HLA-C*07:02 | | |
| IDH1 R132H | HLA-A*29:02; HLA-B*18:01 | IGHHAYGDQY | 1148 |
| IDH1 R132H | HLA-C*12:03; HLA-C*03:03; | IIGHHAYGD | 1149 |
| | HLA-C*15:02 | | |
| IDH1 R132H | HLA-A*29:02 | IIGHHAYGDQY | 1150 |
| IDH1 R132H | HLA-A*31:01 | IIGHHAYGDQYR | 1151 |
| IDH1 R132H | HLA-A*29:02 | IIIGHHAY | 1152 |
| IDH1 R132H | HLA-C*03:03; HLA-C*12:03; | IIIGHHAYG | 1153 |
| | HLA-C*15:02 | | |
| IDH1 R132H | HLA-A*29:02 | IIIGHHAYGDQY | 1154 |
| IDH1 R132H | HLA-A*31:01; HLA-A*68:01 | IIIGHHAYGDQYR | 1155 |
| IDH1 R132H | HLA-C*12:03; HLA-C*03:03 | KPIIIGHHA | 1156 |
| IDH1 R132H | HLA-B*15:01; HLA-B*35:01; | KPIIIGHHAY | 1157 |
| | HLA-A*29:02; HLA-B*07:02 | | |
| IDH1 R132H | HLA-A*02:01 | KPIIIGHHAYG | 1158 |
| IDH1 R132H | HLA-A*29:02 | KPIIIGHHAYGDQY | 1159 |
| IDH1 R132H | HLA-C*12:03; HLA-A*29:02; | PIIIGHHAY | 1160 |
| | HLA-C*03:03; HLA-B*35:01 | | |
| IDH1 R132H | HLA-A*02:01 | PIIIGHHAYGD | 1161 |
| IDH1 R132H | HLA-A*29:02 | PIIIGHHAYGDQY | 1162 |
| IDH1 R132H | HLA-A*31:01 | PIIIGHHAYGDQYR | 1163 |
| IDH1 R132H | HLA-C*12:03; HLA-C*07:02 | VKPIIIGHH | 1164 |
| IDH1 R132H | HLA-A*29:02 | VKPIIIGHHAY | 1165 |
| IDH1 R132H | HLA-C*12:03; HLA-C*03:03; | WVKPIIIGH | 1166 |
| | HLA-C*07:02 | | |
| IDH1 R132H | HLA-A*29:02 | WVKPIIIGHHAY | 1167 |
| JAK1 K860Nfs*16 | HLA-C*12:03; HLA-C*03:03; | DIVSEKNQQ | 1168 |
| | HLA-C*07:02 | | |
| JAK1 K860Nfs*16 | HLA-A*11:01 | DIVSEKNQQ | 1169 |
| JAK1 K860Nfs*16 | HLA-C*12:03; HLA-C*05:01 | EKNQQLKWT | 1170 |
| JAK1 K860Nfs*16 | HLA-C*03:03; HLA-C*12:03; | IVSEKNQQL | 1171 |
| | HLA-C*05:01; HLA-C*16:01; | | |
| | HLA-C*07:01; HLA-C*07:02; | | |
| | HLA-C*15:02; HLA-C*06:02; | | |
| | HLA-C*03:04 | | |
| JAK1 K860Nfs*16 | HLA-A*68:01; HLA-A*03:01; | IVSEKNQQLK | 1172 |
| | HLA-A*11:01 | | |
| JAK1 K860Nfs*16 | HLA-B*44:02 | VSEKNQQLKW | 1173 |
| JAK1 K860Nfs*16 | HLA-B*44:02 | SEKNQQLKWT | 1174 |
| JAK1 K860Nfs*16 | HLA-C*12:03; HLA-C*07:02; | KNQQLKWTP | 1175 |
| JAK1 K860Nfs*16 | HLA-C*12:03; HLA-C*07:02 | KWTPHILKS | 1176 |
| | HLA-C*03:03 | | |
| JAK1 K860Nfs*16 | HLA-A*30:01 | KWTPHILKSA | 1177 |
| JAK1 K860Nfs*16 | HLA-C*12:03; HLA-C*03:03 | LKWTPHILK | 1178 |
| JAK1 K860Nfs*16 | HLA-C*12:03; HLA-C*05:01 | NPDIVSEKN | 1179 |
| JAK1 K860Nfs*16 | HLA-B*08:01 | NPDIVSEKNQQ | 1180 |
| JAK1 K860Nfs*16 | HLA-C*12:03; HLA-C*03:03 | NQQLKWTPH | 1181 |
| JAK1 K860Nfs*16 | HLA-C*12:03; HLA-C*03:03 | PDIVSEKNQ | 1182 |
| JAK1 K860Nfs*16 | HLA-C*12:03; HLA-C*03:03 | QLKWTPHIL | 1183 |
| JAK1 K860Nfs*16 | HLA-A*03:01; HLA-A*11:01 | QLKWTPHILK | 1184 |
| JAK1 K860Nfs*16 | HLA-A*31:01 | QLKWTPHILKS | 1185 |
| JAK1 K860Nfs*16 | HLA-C*12:03; HLA-C*03:03; | QQLKWTPHI | 1186 |
| | HLA-B*13:02; HLA-A*02:01 | | |
| JAK1 K860Nfs*16 | HLA-B*15:01 | QQLKWTPHIL | 1187 |
| JAK1 K860Nfs*16 | HLA-A*11:01; HLA-A*03:01 | QQLKWTPHILK | 1188 |
| JAK1 K860Nfs*16 | HLA-B*18:01 | SEKNQQLK | 1189 |
| JAK1 K860Nfs*16 | HLA-C*12:03; HLA-B*44:02; | SEKNQQLKW | 1190 |
| | HLA-B*44:03 | | |
| JAK1 K860Nfs*16 | HLA-B*07:02 | TPHILKSA | 1191 |
| JAK1 K860Nfs*16 | HLA-C*12:03; HLA-C*03:03; | TPHILKSAS | 1192 |
| | HLA-B*35:01 | | |
| JAK1 K860Nfs*16 | HLA-C*07:01; HLA-C*12:03; | VSEKNQQLK | 1193 |
| | HLA-C*05:01; HLA-C*15:02; | | |
| | HLA-C*03:03; HLA-A*11:01 | | |
| JAK1 K860Nfs*16 | HLA-C*12:03; HLA-C*15:02 | WTPHILKSA | 1194 |
| KRAS G12C | HLA-C*03:03; HLA-C*12:03 | ACGVGKSAL | 1195 |
| KRAS G12C | HLA-C*03:03; HLA-C*12:03 | CGVGKSALT | 1196 |
| KRAS G12C | HLA-C*12:03; HLA-C*03:03; | GACGVGKSA | 1197 |
| | HLA-C*15:02 | | |
| KRAS G12C | HLA-A*24:02 | GVGKSALT | 1198 |
| KRAS G12C | HLA-C*12:03; HLA-C*03:03; | KLVVVGACG | 1199 |
| | HLA-C*05:01 | | |
| KRAS G12C | HLA-A*02:01 | KLVVVGACGV | 1200 |
| KRAS G12C | HLA-A*03:01 | KLVVVGACGVGK | 1201 |
| KRAS G12C | HLA-C*12:03; HLA-C*15:02; | LVVVGACGV | 1202 |
| | HLA-C*03:03 | | |
| KRAS G12C | HLA-A*11:01 | LVVVGACGVGK | 1203 |
| KRAS G12C | HLA-C*12:03; HLA-C*03:03; | VGACGVGKS | 1204 |
| | HLA-C*07:02 | | |
| KRAS G12C | HLA-C*12:03; HLA-A*11:01; | VVGACGVGK | 1205 |
| | HLA-C*03:03; HLA-A*03:01; | | |
| | HLA-C*05:01 | | |
| KRAS G12C | HLA-C*12:03; HLA-C*03:03; | VVVGACGVG | 1206 |
| | HLA-C*07:02 | | |
| KRAS G12C | HLA-A*03:01; HLA-A*11:01; | VVVGACGVGK | 1207 |
| | HLA-A*68:01 | | |
| KRAS G12C | HLA-C*03:03; HLA-C*12:03; | YKLVVVGAC | 1208 |
| | HLA-C*07:02 | | |
| KRAS G12D | HLA-C*03:03; HLA-C*12:03 | ADGVGKSAL | 1209 |
| KRAS G12D | HLA-C*03:03; HLA-C*12:03 | DGVGKSALT | 1210 |
| KRAS G12D | HLA-C*12:03; HLA-C*15:01; | GADGVGKSA | 1211 |
| | HLA-C*08:02; HLA-C*15:02 | | |
| KRAS G12D | HLA-A*24:02 | GVGKSALT | 1198 |
| KRAS G12D | HLA-C*12:03; HLA-C*03:03; | KLVVVGADG | 1212 |
| | HLA-C*05:01 | | |
| KRAS G12D | HLA-A*02:01 | KLVVVGADGV | 1213 |
| KRAS G12D | HLA-C*12:03; HLA-C*15:02; | LVVVGADGV | 1214 |
| | HLA-C*03:03 | | |
| KRAS G12D | HLA-A*11:01 | LVVVGADGVGK | 1215 |
| KRAS G12D | HLA-C*03:03; HLA-C*12:03; | VGADGVGKS | 1216 |
| | HLA-C*07:02 | | |
| KRAS G12D | HLA-C*12:03; HLA-C*03:03; | VVGADGVGK | 1217 |
| | HLA-A*11:01; HLA-C*15:01 | | |
| KRAS G12D | HLA-C*03:03; HLA-C*12:03; | VVVGADGVG | 1218 |
| | HLA-C*07:02; HLA-C*15:02 | | |
| KRAS G12D | HLA-A*11:01; HLA-A*68:01; | VVVGADGVGK | 1219 |
| | HLA-A*03:01 | | |
| KRAS G12D | HLA-C*03:03; HLA-C*12:03; | YKLVVVGAD | 1220 |
| | HLA-C*07:02 | | |
| KRAS G12V | HLA-C*03:03; HLA-C*12:03; | AVGVGKSAL | 1221 |
| | HLA-B*07:02 | | |
| KRAS G12V | HLA-C*12:03; HLA-C*03:03; | GAVGVGKSA | 1222 |
| | HLA-C*15:02 | | |
| KRAS G12V | HLA-A*02:01 | KLVVVGAV | 1223 |
| KRAS G12V | HLA-A*24:02 | GVGKSALT | 1198 |
| KRAS G12V | HLA-C*12:03; HLA-C*03:03; | KLVVVGAVG | 1224 |
| | HLA-C*05:01 | | |
| KRAS G12V | HLA-A*02:01 | KLVVVGAVGV | 219 |
| KRAS G12V | HLA-A*03:01 | KLVVVGAVGVGK | 1225 |
| KRAS G12V | HLA-C*12:03; HLA-C*15:02; | LVVVGAVGV | 220 |
| | HLA-C*03:03 | | |
| KRAS G12V | HLA-B*15:01 | LVVVGAVGVG | 1226 |
| KRAS G12V | HLA-A*11:01 | LVVVGAVGVGK | 1227 |
| KRAS G12V | HLA-C*12:03; HLA-C*03:03; | VGAVGVGKS | 1228 |
| | HLA-C*07:02 | | |
| KRAS G12V | HLA-A*03:03; HLA-C*12:03 | VGVGKSALT | 1229 |
| KRAS G12V | HLA-C*12:03; HLA-A*11:01; | VVGAVGVGK | 1230 |
| | HLA-C*03:01; HLA-C*05:01; | | |
| | HLA-C*03:03 | | |
| KRAS G12V | HLA-C*12:03; HLA-C*03:03; | VVVGAVGVG | 221 |
| | HLA-C*07:02 | | |
| KRAS G12V | HLA-A*11:01; HLA-A*03:01; | VVVGAVGVGK | 1231 |
| | HLA-A*68:01 | | |
| KRAS G12V | HLA-C*12:03; HLA-C*03:03 | YKLVVVGAV | 1232 |
| KRAS G13D | HLA-C*12:03; HLA-C*05:01; | AGDVGKSAL | 1233 |
| | HLA-C*08:02; HLA-C*03:03; | | |
| | HLA-C*07:02 | | |
| KRAS G13D | HLA-A*24:02 | DVGKSALT | 1234 |
| KRAS G13D | HLA-C*12:03; HLA-C*15:02; | DVGKSALTI | 1235 |
| | HLA-C*03:03 | | |
| KRAS G13D | HLA-A*24:02; HLA-A*02:01 | GAGDVGKS | 1236 |
| KRAS G13D | HLA-C*12:03; HLA-C*03:03; | GAGDVGKSA | 1237 |
| | HLA-C*15:02; HLA-C*15:01 | | |
| KRAS G13D | HLA-C*03:03; HLA-C*12:03 | GDVGKSALT | 1238 |
| KRAS G13D | HLA-C*12:03; HLA-C*03:03; | KLVVVGAGD | 1239 |
| | HLA-C*05:01 | | |
| KRAS G13D | HLA-C*12:03; HLA-C*03:03; | LVVVGAGDV | 1240 |
| | HLA-C*15:02 | | |
| KRAS G13D | HLA-A*11:01 | LVVVGAGDVGK | 1241 |
| KRAS G13D | HLA-C*03:03; HLA-C*12:03; | VGAGDVGKS | 1242 |
| | HLA-C*07:02 | | |
| KRAS G13D | HLA-C*12:03; HLA-C*03:03; | VVGAGDVGK | 1243 |
| | HLA-A*11:01; HLA-C*05:01; | | |
| | HLA-C*07:02 | | |
| KRAS G13D | HLA-C*12:03; HLA-C*03:03; | VVVGAGDVG | 1244 |
| | HLA-C*15:02 | | |
| KRAS G13D | HLA-A*11:01; HLA-A*68:01; | VVVGAGDVGK | 1245 |
| | HLA-A*03:01 | | |
| NPM1 W288Cfs*12 | HLA-B*40:01; HLA-B*44:03; | QEAIWDLCL | 1246 |
| | HLA-C*03:03; HLA-C*07:02; | | |
| | HLA-C*12:03 | | |
| NPM1 W288Cfs*12 | HLA-C*03:03; HLA-C*12:03 | EAIWDLCLA | 1247 |
| NPM1 W288Cfs*12 | HLA-B*15:01 | QEAIWDLCLA | 1248 |
| NPM1 W288Cfs*12 | HLA-C*03:03; HLA-C*05:01; | DQEAIWDLC | 1249 |
| | HLA-C*12:03 | | |
| NPM1 W288Cfs*12 | HLA-B*15:01 | DQEAIWDLCL | 1250 |
| NPM1 W288Cfs*12 | HLA-A*02:01 | EAIWDLCLAV | 1251 |
| NPM1 W288Cfs*12 | HLA-C*12:03; HLA-A*02:01 | AIWDLCLAV | 1252 |
| NPM1 W288Cfs*12 | HLA-C*05:01; HLA-C*12:03 | IWDLCLAVE | 1253 |
| NPM1 W288Cfs*12 | HLA-A*02:01; HLA-B*15:01 | AIWDLCLAVE | 1254 |
| NPM1 W288Cfs*12 | HLA-C*03:03; HLA-C*12:03 | WDLCLAVEE | 1255 |
| NPM1 W288Cfs*12 | HLA-A*02:01 | WDLCLAVEEV | 1256 |
| NPM1 W288Cfs*12 | HLA-C*12:03; HLA-A*02:01; | AIQDLCLAV | 1257 |
| | HLA-C*15:02 | | |
| NPM1 W288Cfs*12 | HLA-B*15:01 | AIQDLCLAVE | 1258 |
| NPM1 W288Cfs*12 | HLA-C*05:01; HLA-C*12:03; | AVEEVSLRK | 1259 |
| | HLA-A*11:01; HLA-A*03:01; | | |
| | HLA-C*15:02; HLA-A*30:01 | | |
| NPM1 W288Cfs*12 | HLA-A*02:01 | CLAVEEVS | 1260 |
| NPM1 W288Cfs*12 | HLA-C*03:03; HLA-C*12:03; | CLAVEEVSL | 1261 |
| | HLA-C*07:02 | | |
| NPM1 W288Cfs*12 | HLA-A*68:01 | CLAVEEVSLR | 1262 |
| NPM1 W288Cfs*12 | HLA-A*11:01; HLA-A*03:01 | CLAVEEVSLRK | 1263 |
| NPM1 W288Cfs*12 | HLA-C*12:03 | DLCLAVEEV | 1264 |
| NPM1 W288Cfs*12 | HLA-B*15:01 | DLCLAVEEVS | 1265 |
| NPM1 W288Cfs*12 | HLA-C*12:03; HLA-C-05:01; | DQEAIQDLC | 1266 |
| | HLA-C*03:03 | | |
| NPM1 W288Cfs*12 | HLA-B*15:01 | DQEAIQDLCL | 1267 |
| NPM1 W288Cfs*12 | HLA-C*12:03; HLA-C*03:03; | EAIQDLCLA | 1268 |
| | HLA-C*15:02 | | |
| NPM1 W288Cfs*12 | HLA-C*12:03; HLA-C*05:01; | IQDLCLAVE | 1269 |
| | HLA-C*08:02 | | |
| NPM1 W288Cfs*12 | HLA-B*15:01 | IQDLCLAVEE | 1270 |
| NPM1 W288Cfs*12 | HLA-C*12:03; HLA-C*03:03; | LAVEEVSLR | 1271 |
| | HLA-A*68:01; HLA-C*05:01; | | |
| | HLA-A*31:01; | | |
| NPM1 W288Cfs*12 | HLA-A*11:01; HLA-A*68:01 | LAVEEVSLRK | 1272 |
| NPM1 W288Cfs*12 | HLA-C*12:03; HLA-C*03:03 | LCLAVEEVS | 1273 |
| NPM1 W288Cfs*12 | HLA-B*15:01; HLA-B*08:01 | LCLAVEEVSL | 1274 |
| NPM1 W288Cfs*12 | HLA-C*03:03; HLA-C*12:03 | QDLCLAVEE | 1275 |
| NPM1 W288Cfs*12 | HLA-B*18:01 | QEAIQDLC | 1276 |
| NPM1 W288Cfs*12 | HLA-C*03:03; HLA-B*40:01; | QEAIQDLCL | 1277 |
| | HLA-C*12:03; HLA-C*07:02 | | |
| NPM1 W288Cfs*12 | HLA-A*02:01 | QEAIQDLCLAV | 1278 |
| NRAS Q61K | HLA-C*12:03; HLA-C*03:03; | AGKEEYSAM | 1279 |
| | HLA-C*07:02 | | |
| NRAS Q61K | HLA-A*31:01 | AGKEEYSAMR | 1280 |
| NRAS Q61K | HLA-C*12:03; HLA-C*03:03; | DILDTAGKE | 1281 |
| | HLA-C*15:02 | | |
| NRAS Q61K | HLA-A*29:02 | DILDTAGKEEY | 1282 |
| NRAS Q61K | HLA-B*18:01 | DTAGKEEY | 1283 |
| NRAS Q61K | HLA-C*03:03; HLA-C*12:03 | DTAGKEEYS | 1284 |
| NRAS Q61K | HLA-A*26:01 | DTAGKEEYSAM | 1285 |
| NRAS Q61K | HLA-A*68:01; HLA-A*26:01 | DTAGKEEYSAMR | 1286 |
| NRAS Q61K | HLA-A*26:01 | DTAGKEEYSAMRD | 1287 |
| NRAS Q61K | HLA-B*18:01 | EEYSAMRD | 1133 |
| NRAS Q61K | HLA-C*12:03; HLA-C*05:01; | GKEEYSAMR | 1288 |
| | HLA-C*03:03 | | |
| NRAS Q61K | HLA-C*12:03; HLA-C*05:01; | ILDTAGKEE | 1289 |
| | HLA-C*08:02 | | |
| NRAS Q61K | HLA-B*15:01; HLA-A*01:01; | ILDTAGKEEY | 1290 |
| | HLA-A*29:02 | | |
| NRAS Q61K | HLA-A*68:01 | ILDTAGKEEYSAMR | 1291 |
| NRAS Q61K | HLA-C*12:03; HLA-C*05:01; | KEEYSAMRD | 1292 |
| | HLA-C*03:03 | | |
| NRAS Q61K | HLA-C*12:03; HLA-C*03:03 | LDILDTAGK | 1293 |
| NRAS Q61K | HLA-C*03:03; HLA-C*12:03; | LDTAGKEEY | 1294 |
| | HLA-B*35:01 | | |
| NRAS Q61K | HLA-A*68:01 | LDTAGKEEYSAMR | 1295 |
| NRAS Q61K | HLA-A*02:01 | TAGKEEYS | 1296 |
| NRAS Q61K | HLA-C*12:03; HLA-C*03:03 | TAGKEEYSA | 1297 |
| NRAS Q61R | HLA-C*12:03; HLA-C*07:02; | AGREEYSAM | 1124 |
| | HLA-C*16:01; HLA-C*03:03 | | |
| NRAS Q61R | HLA-A*31:01 | AGREEYSAMR | 1125 |
| NRAS Q61R | HLA-C*12:03; HLA-C*03:03; | DILDTAGRE | 1126 |
| | HLA-C*15:02 | | |
| NRAS Q61R | HLA-A*29:02 | DILDTAGREEY | 1127 |
| NRAS Q61R | HLA-B*18:01 | DTAGREEY | 1128 |
| NRAS Q61R | HLA-C*03:03; HLA-C*12:03; | DTAGREEYS | 1129 |
| | HLA-C*07:01 | | |
| NRAS Q61R | HLA-A*26:01 | DTAGREEYSAM | 1130 |
| NRAS Q61R | HLA-A*68:01; HLA-A*26:01 | DTAGREEYSAMR | 1131 |
| NRAS Q61R | HLA-A*26:01 | DTAGREEYSAMRD | 1132 |
| NRAS Q61R | HLA-B*18:01 | EEYSAMRD | 1133 |
| NRAS Q61R | HLA-C*07:01; HLA-C*12:03; | GREEYSAMR | 1134 |
| | HLA-C*07:02; HLA-C*05:01; | | |
| | HLA-C*03:03 | | |
| NRAS Q61R | HLA-B*27:05 | GREEYSAMRD | 1135 |
| NRAS Q61R | HLA-C*12:03; HLA-C*05:01; | ILDTAGREE | 1136 |
| | HLA-C*08:02; HLA-C*07:01; | | |
| | HLA-C*03:03 | | |
| NRAS Q61R | HLA-B*15:01; HLA-A*01:01; | ILDTAGREEY | 230 |
| | HLA-A*29:02 | | |
| NRAS Q61R | HLA-A*68:01 | ILDTAGREEYSAMR | 1137 |
| NRAS Q61R | HLA-C*12:03; HLA-C*03:03; | LDILDTAGR | 1138 |
| | HLA-A*68:01 | | |
| NRAS Q61R | HLA-C*03:03; HLA-C*12:03; | LDTAGREEY | 1139 |
| | HLA-B*35:01 | | |
| NRAS Q61R | HLA-A*68:01 | LDTAGREEYSAMR | 1140 |
| NRAS Q61R | HLA-C*12:03; HLA-C*03:03; | REEYSAMRD | 1141 |
| | HLA-C*05:01 | | |
| NRAS Q61R | HLA-A*02:01 | TAGREEYS | 1142 |
| NRAS Q61R | HLA-C*12:03; HLA-C*03:03 | TAGREEYSA | 1143 |
| P53 R175H | HLA-C*03:03; HLA-C*12:03; | EVVRHCPHH | 1298 |
| | HLA-C*07:02 | | |
| P53 R175H | HLA-A*31:01; HLA-A*68:01 | EVVRHCPHHER | 1299 |
| P53 R175H | HLA-C*12:03; HLA-C*07:02 | HCPHHERCS | 1300 |
| P53 R175H | HLA-C*12:03; HLA-C*07:02 | HMTEVVRHC | 1301 |
| P53 R175H | HLA-A*31:01; HLA-A*68:01 | HMTEVVRHCPHHER | 1302 |
| P53 R175H | HLA-C*12:03; HLA-C*15:02; | MTEVVRHCP | 1303 |
| | HLA-C*03:03 | | |
| P53 R175H | HLA-A*31:01; HLA-A*68:01 | MTEVVRHCPHHER | 1304 |
| P53 R175H | HLA-A*31:01 | MTEVVRHCPHHERC | 1305 |
| P53 R175H | HLA-C*12:03; HLA-C*03:03 | QHMTEVVRH | 1306 |
| P53 R175H | HLA-A*31:01 | RHCPHHER | 1307 |
| P53 R175H | HLA-C*12:03; HLA-C*07:02; | RHCPHHERC | 1308 |
| | HLA-C*03:03 | | |
| P53 R175H | HLA-B*18:01 | TEVVRHCP | 1309 |
| P53 R175H | HLA-C*03:03; HLA-C*12:03; | TEVVRHCPH | 1310 |
| | HLA-C*07:02 | | |
| P53 R175H | HLA-A*31:01; HLA-A*68:01 | TEVVRHCPHHER | 1311 |
| P53 R175H | HLA-C*07:01; HLA-C*12:03; | VRHCPHHER | 1312 |
| | HLA-C*03:03; HLA-C*07:02; | | |
| | HLA-B*27:05; HLA-A*31:01 | | |
| P53 R175H | HLA-C*12:03 | VVRHCPHHE | 1313 |
| P53 R175H | HLA-A*31:01; HLA-A*68:01 | VVRHCPHHER | 1314 |
| P53 R248Q | HLA-A*24:02 | CMGGMNQR | 1315 |
| P53 R248Q | HLA-C*12:03; HLA-C*03:03; | CMGGMNQRP | 1316 |
| | HLA-C*07:02 | | |
| P53 R248Q | HLA-C*07:02; HLA-C*12:03; | GGMNQRPIL | 1317 |
| | HLA-C 03:30 | | |
| P53 R248Q | HLA-A*02:01 | GGMNQRPILTI | 1318 |
| P53 R248Q | HLA-C*12:03; HLA-C*07:01; | GMNQRPILT | 1319 |
| | HLA-C*05:01; HLA-C*06:02 | | |
| P53 R248Q | HLA-B*15:01 | GMNQRPILTI | 1320 |
| P53 R248Q | HLA-A*02:01 | GMNQRPILTII | 1321 |
| P53 E248Q | HLA-A*24:02 | MGGMNQRP | 1322 |
| P53 R248Q | HLA-C*03:03; HLA-C*12:03; | MGGMNQRPI | 1323 |
| | HLA-C*07:02 | | |
| P53 R248Q | HLA-B*08:01 | MGGMNQRPIL | 1324 |
| P53 R248Q | HLA-C*12:03; HLA-C*03:03; | MNQRPILTI | 1325 |
| | HLA-A*32:01 | | |
| P53 R248Q | HLA-C*12:03 | NQRPILTII | 1326 |
| P53 R248Q | HLA-B*15:01 | NQRPILTIIT | 1327 |
| P53 R248Q | HLA-C*12:03; HLA-C*07:02 | QRPILTIIT | 1328 |
| P53 R248Q | HLA-C*12:03; HLA-C*03:03; | SCMGGMNQR | 1329 |
| | HLA-C*07:02; HLA-A*31:01 | | |
| P53 R248Q | HLA-C*12:03; HLA-C*15:02; | SSCMGGMNQ | 1330 |
| | HLA-C*03:03; HLA-C*07:01 | | |
| P53 R248Q | HLA-A*11:01; HLA-A*68:01; | SSCMGGMNQR | 1331 |
| | HLA-A*31:01 | | |
| P53 R248Q | HLA-A*11:01 | SSCMGGMNQRP | 1332 |
| P53 R273C | HLA-C*12:03; HLA-C*03:03 | CVCACPGRD | 1333 |
| P53 R273C | HLA-C*03:03; HLA-C*12:03 | EVCVCACPG | 1334 |
| P53 R273C | HLA-A*68:01; HLA-A*31:01 | EVCVCACPGR | 1335 |
| P53 R273C | HLA-B*18:01 | FEVCVCAC | 1336 |
| P53 R273C | HLA-C*03:03; HLA-C*12:03; | FEVCVCACP | 1337 |
| | HLA-C*07:02 | | |
| P53 R273C | HLA-C*12:03; HLA-C*07:01; | GRNSFEVCV | 1338 |
| | HLA-C*06:03; HLA-C*07:02 | | |
| P53 R273C | HLA-C*12:03 | LGRNSFEVC | 1339 |
| P53 R273C | HLA-C*12:03; HLA-C*07:01; | NSFEVCVCA | 1340 |
| | HLA-C*15:02; HLA-C*03:03; | | |
| | HLA-C*07:02; HLA-C*06:02 | | |
| P53 R273C | HLA-B*15:01 | NSFEVCVCAC | 1341 |
| P53 R273C | HLA-A*68:01 | NSFEVCVCACPGR | 1342 |
| P53 R273C | HLA-C*03:03; HLA-C*12:03; | RNSFEVCVC | 1343 |
| | HLA-C*15:02; HLA-C*07:03; | | |
| P53 R273C | HLA-A*68:01 | RNSFEVCVCACPGR | 1344 |
| P53 R273C | HLA-C*12:03; HLA-C*03:03; | SFEVCVCAC | 1345 |
| | HLA-C*07:02 | | |
| P53 R273C | HLA-C*12:03; HLA-C*03:03; | VCVCACPGR | 1346 |
| | HLA-C*07:02 | | |
| P53 R273H | HLA-C*03:03; HLA-C*12:03 | EVHVCACPG | 1347 |
| P53 R273H | HLA-A*68:01 | EVHVCACPGR | 1348 |
| P53 R273H | HLA-B*18:01 | FEVHVCAC | 1349 |
| P53 R273H | HLA-C*03:03; HLA-C*12:03; | FEVHVCACP | 1350 |
| | HLA-C*07:02; HLA-C*05:01 | | |
| P53 R273H | HLA-C*12:03; HLA-C*07:01; | GRNSFEVHV | 1351 |
| | HLA-C*06:02; HLA-C*07:02 | | |
| P53 R273H | HLA-C*12:03; HLA-C*03:03; | HVCACPGRD | 1352 |
| | HLA-C*07:02 | | |
| P53 R273H | HLA-C*12:03 | LGRNSFEVH | 1353 |
| P53 R273H | HLA-C*12:03; HLA-C*07:01; | NSFEVHVCA | 1354 |
| | HLA-C*15:02; HLA-C*03:03; | | |
| | HLA-C*06:02 | | |
| P53 R273H | HLA-B*15:01 | NSFEVHVCAC | 1355 |
| P53 R273H | HLA-A*68:01 | NSFEVHVCACPGR | 1356 |
| P53 R273H | HLA-C*12:03; HLA-C*03:03; | RNSFEVHVC | 1357 |
| | HLA-C*15:02 | | |
| P53 R273H | HLA-A*68:01 | RNSFEVHVCACPGR | 1358 |
| P53 R273H | HLA-C*12:03; HLA-C*03:03; | SFEVHVCAC | 1359 |
| | HLA-C*07:02 | | |
| P53 R273H | HLA-C*12:03; HLA-C*03:03; | VHVCACPGR | 1360 |
| | HLA-C*07:02 | | |
| PIK3CA E542K | HLA-C*03:03; HLA-C*12:03 | DPLSKITEQ | 1361 |
| PIK3CA E542K | HLA-A*11:01 | DPLSKITEQEK | 1362 |
| PIK3CA E542K | HLA-A*02:01 | ISTRDPLS | 1363 |
| PIK3CA E542K | HLA-C*15:02; HLA-C*12:03; | ISTRDPLSK | 1364 |
| | HLA-C*03:03; HLA-A*11:01; | | |
| | HLA-A*30:01; HLA-A*03:01; | | |
| | HLA-C*08:02 | | |
| PIK3CA E542K | HLA-B*08:01 | KITEQEKD | 1365 |
| PIK3CA E542K | HLA-C*12:03; HLA-C*03:03; | KITEQEKDF | 1366 |
| | HLA-C*07:02 | | |
| PIK3CA E542K | HLA-C*12:03; HLA-A*30:01; | LSKITEQEK | 1367 |
| | HLA-C*03:03; HLA-C*15:02 | | |
| PIK3CA E542K | HLA-A*31:01 | LSKITEQEKDF | 1368 |
| PIK3CA E542K | HLA-C*03:03; HLA-C*12:03; | PLSKITEQE | 1369 |
| | HLA-C*05:01 | | |
| PIK3CA E542K | HLA-C*12:03 | RDPLSKITE | 1370 |
| PIK3CA E542K | HLA-C*12:03; HLA-C*03:03 | SKITEQEKD | 1371 |
| PIK3CA E542K | HLA-A*30:01 | STRDPLSK | 1372 |
| PIK3CA E542K | HLA-C*12:03; HLA-A*30:01; | STRDPLSKI | 1373 |
| | HLA-C*15:02 | | |
| PIK3CA E542K | HLA-A*31:01 | STRDPLSKITE | 1374 |
| PIK3CA E542K | HLA-C*12:03; HLA-C*07:01; | TRDPLSKIT | 1375 |
| | HLA-C*06:02; HLA-C*07:02 | | |
| PIK3CA E542K | HLA-B*08:01 | TRDPLSKITEQ | 1376 |
| PIK3CA E545K | HLA-A*03:01 | STRDPLSEITK | 1377 |
| PIK3CA E545K | HLA-C*03:03; HLA-C*12:03 | DPLSEITKQ | 1378 |
| PIK3CA E545K | HLA-A*11:01 | DPLSEITKQEK | 1379 |
| PIK3CA E545K | HLA-B*08:01 | EITKQEKD | 1380 |
| PIK3CA E545K | HLA-C*03:03; HLA-C*12:03 | EITKQEKDF | 1381 |
| PIK3CA E545K | HLA-C*12:03; HLA-C*03:03; | ITKQEKDFL | 1382 |
| | HLA-A*30:01 | | |
| PIK3CA E545K | HLA-A*31:01 | ITKQEKDFLWS | 1383 |
| PIK3CA E545K | HLA-A*24:02 | KQEKDFLW | 1384 |
| PIK3CA E545K | HLA-3*12:03; HLA-C*05:01 | KQEKDFLWS | 1385 |
| PIK3CA E545K | HLA-C*12:03; HLA-C*05:01; | LSEITKQEK | 1386 |
| | HLA-C*15:02; HLA-C*03:03; | | |
| | HLA-C*07:01 | | |
| PIK3CA E545K | HLA-B*44:03 | LSEITKQEKDFLW | 1387 |
| PIK3CA E545K | HLA-C*12:03; HLA-A*03:03; | PLSEITKQE | 1388 |
| | HLA-C*05:01; HLA-C*07:02 | | |
| PIK3CA E545K | HLA-B*18:01; HLA-A*02:01 | QEKDFLWS | 1389 |
| PIK3CA E545K | HLA-C*12:03; HLA-C*07:02 | RDPLSEITK | 1390 |
| PIK3CA E545K | HLA-B*18:01 | SEITKQEK | 1391 |
| PIK3CA E545K | HLA-C*12:03; HLA-C*03:03 | SEITKQEKD | 1392 |
| PIK3CA E545K | HLA-B*44:02; HLA-B*15:01; | SEITKQEKDF | 1393 |
| | HLA-B*44:03 | | |
| PIK3CA E545K | HLA-B*44:02; HLA-B*44:03 | SEITKQEKDFLW | 1394 |
| PIK3CA E545K | HLA-B*44:03; HLA-B*44:02 | SEITKQEKDFLWS | 1395 |
| PIK3CA E545K | HLA-B*08:01 | TKQEKDFL | 1396 |
| PIK3CA E545K | HLA-C*12:03; HLA-C*03:03 | TKQEKDFLW | 1397 |
| PIK3CA H1047R | HLA-C*03:03; HLA-C*12:03; | ARHGGWTTK | 1398 |
| | HLA-C*07:01; HLA-B*27:05; | | |
| | HLA-C*07:02; HLA-A*30:01 | | |
| PIK3CA H1047R | HLA-B*27:05; HLA-C*07:01; | ARHGGWTTKM | 1399 |
| | HLA-C*07:02 | | |
| PIK3CA H1047R | HLA-C*12:03; HLA-C*15:02 | DARHGGWTT | 1400 |
| PIK3CA H1047R | HLA-C*12:03; HLA-C*03:03; | FMKQMNDAR | 1401 |
| | HLA-A*31:01; HLA-A*68:01; | | |
| | HLA-C*07:02 | | |
| PIK3CA H1047R | HLA-A*31:01 | FMKQMNDARHG | 1402 |
| PIK3CA H1047R | HLA-A*24:02 | HGGWTTKM | 1403 |
| PIK3CA H1047R | HLA-C*12:03; HLA-B*15:01 | KQMNDARHG | 1404 |
| PIK3CA H1047R | HLA-A*03:01 | KQMNDARHGGWTTK | 1405 |
| PIK3CA H1047R | HLA-C*12:03;HLA-C*03:03 | MKQMNDARH | 1406 |
| PIK3CA H1047R | HLA-B*15:01 | MKQMNDARHG | 1407 |
| PIK3CA H1047R | HLA-C*12:03; HLA-C*05:01; | MNDARHGGW | 1408 |
| | HLA-C*08:02; HLA-C*07:01 | | |
| PIK3CA H1047R | HLA-C*12:03; HLA-C*03:03 | NDARHGGWT | 1409 |
| PIK3CA H1047R | HLA-C*11:01 | NDARHGGWTTK | 1410 |
| PIK3CA H1047R | HLA-C*12:03; HLA-C*07:01 | QMNDARHGG | 1411 |
| PIK3CA H1047R | HLA-B*44:02 | QMNDARHGGW | 1412 |
| PIK3CA H1047R | HLA-A*02:01 | QMNDARHGGWT | 1413 |
| PIK3CA H1047R | HLA-A*24:02; HLA-B*27:05 | RHGGWTTK | 1414 |
| PIK3CA H1047R | HLA-C*12:03; HLA-C*03:03; | RHGGWTTKM | 1415 |
| | HLA-C*07:02 | | |
| PPP2R1A P179R | HLA-C*12:03; HLA-C*05:01; | CSDDTRMVR | 1416 |
| | HLA-C*07:01; HLA-C*15:02; | | |
| | HLA-A*68:01; HLA-A*31:01 | | |
| PPP2R1A P179R | HLA-A*31:01; HLA-A*68:01 | CSDDTRMVRR | 1417 |
| PPP2R1A P179R | HLA-C*12:03; HLA-C*03:03; | DDTRMVRRA | 1418 |
| | HLA-C*07:02 | | |
| PPP2R1A P179R | HLA-C*12:03; HLA-A*30:01 | DTRMVRRAA | 1419 |
| PPP2R1A P179R | HLA-B*08:01; HLA-B*15:01 | DTRMVRRAAA | 1420 |
| PPP2R1A P179R | HLA-A*31:01 | DTRMVRRAAAS | 1421 |
| PPP2R1A P179R | HLA-C*12:03; HLA-C*03:03; | LCSDDTRMV | 1422 |
| | HLA-C*07:01; HLA-C*06:02 | | |
| PPP2R1A P179R | HLA-A*31:01 | LCSDDTRMVR | 1423 |
| PPP2R1A P179R | HLA-C*03:03; HLA-C*07:02; | NLCSDDTRM | 1424 |
| | HLA-C*12:03 | | |
| PPP2R1A P179R | HLA-A*02:01 | NLCSDDTRMV | 1425 |
| PPP2R1A P179R | HLA-B*08:01 | RMVRRAAA | 1426 |
| PPP2R1A P179R | HLA-C*03:03; HLA-C*12:03 | RMVRRAAAS | 1427 |
| PPP2R1A P179R | HLA-C*03:03; HLA-C*12:03; | RNLCSDDTR | 1428 |
| | HLA-A*31:01; HLA-C*07:02 | | |
| PPP2R1A P179R | HLA-A*31:01 | RNLCSDDTRMVRR | 1429 |
| PPP2R1A P179R | HLA-C*12:03; HLA-C*05:01; | SDDTRMVRR | 1430 |
| | HLA-C*08:02 | | |
| PPPSR1A P179R | HLA-B*08:01 | TRMVRRAA | 1431 |
| PPP2R1A P179R | HLA-C*12:03; HLA-B*08:01; | TRMVRRAAA | 1432 |
| | HLA-C*07:01; HLA-C*06:02; | | |
| | HLA-C*03:03; HLA-B*14:02; | | |
| | HLA-C*07:02 | | |
| PTEN R130G | HLA-C*12:03; HLA-C*03:03; | AGKGGTGVM | 1433 |
| | HLA-C*07:02 | | |
| PTEN R130G | HLA-A*31:01 | AGKGGTGVMIC | 1434 |
| PTEN R130G | HLA-C*03:03; HLA-C*12:03 | CKAGKGGTG | 1435 |
| PTEN R130G | HLA-B*07:02 | CKAGKGGTGV | 1436 |
| PTEN R130G | HLA-C*12:03; HLA-A*03:03; | GGTGVMICA | 1437 |
| | HLA-C*07:02 | | |
| PTEN R130G | HLA-B*15:01; HLA-A*29:02 | GGTGVMICAY | 1438 |
| PTEN R130G | HLA-C*12:03; HLA-C*03:03 | GKGGTGVMI | 1439 |
| PTEN R130G | HLA-A*24:02 | GTGVMICA | 1440 |
| PTEN R130G | HLA-C*12:03; HLA-C*03:03; | GTGVMICAY | 1441 |
| | HLA-A*01:01; HLA-B*15:01; | | |
| | HLA-A*29:02 | | |
| PTEN R130G | HLA-C*12:03; HLA-C*03:03 | HCKAGKGGT | 1442 |
| PTEN R130G | HLA-A*31:01 | HCKAGKGGTGV | 1443 |
| PTEN R130G | HLA-C*12:03; HLA-C*03:03 | IHCKAGKGG | 1444 |
| PTEN R130G | HLA-C*12:03; HLA-C*15:02; | KAGKGGTGV | 1445 |
| | HLA-C*05:01; HLA-C*03:03 | | |
| PTEN R130G | HLA-A*24:02 | KGGTGVMI | 1446 |
| PTEN R130G | HLA-C*12:03; HLA-C*03:03; | KGGTGVMIC | 1447 |
| | HLA-C*07:02 | | |
| PTEN R130G | HLA-A*29:02 | KGGTGVMICAY | 1448 |
| PTEN R130Q | HLA-C*12:03; HLA-C*03:03; | AGKGQTGVM | 1449 |
| | HLA-C*07:02 | | |
| PTEN R130Q | HLA-A*31:01 | AGKGQTGVMIC | 1450 |
| PTEN R130Q | HLA-C*03:03; HLA-C*12:03 | CKAGKGQTG | 1451 |
| PTEN R130Q | HLA-C*12:03; HLA-C*03:03 | GKGQTGVMI | 1452 |
| PTEN R130Q | HLA-C*12:03; HLA-C*03:03 | GQTGVMICA | 1453 |
| PTEN R130Q | HLA-B*15:01; HLA-A*29:02 | GQTGVMICAY | 1454 |
| PTEN R130Q | HLA-C*12:03; HLA-C*03:03; | HCKAGKGQT | 1455 |
| | HLA-C*07:02 | | |
| PTEN R130Q | HLA-C*12:03; HLA-C*03:03 | IHCKAGKGQ | 1456 |
| PTEN R130Q | HLA-C*12:03; HLA-C*15:02; | KAGKGQTGV | 1457 |
| | HLA-C*05:01; HLA-C*03:03 | | |
| PTEN R130Q | HLA-C*12:03; HLA-C*03:03; | KGQTGVMIC | 1458 |
| | HLA-C*07:02 | | |
| PTEN R130Q | HLA-A*29:02 | KGQTGVMICAY | 1459 |
| PTEN R130Q | HLA-A*24:02 | QTGVMICA | 1460 |
| PTEN R130Q | HLA-C*12:03; HLA-C*03:03; | QTGVMICAY | 1461 |
| | HLA-A*01:01; HLA-B*15:01; | | |
| | HLA-A*29:02 | | |
| RNF43 G659Vfs*41 | HLA-B*08:01 | ALGPRMQL | 1462 |
| RNF43 G659Vfs*41 | HLA-C*12:03; HLA-C*03:03; | ALGPRMQLC | 1463 |
| | HLA-C*07:01; HLA-C*07:02 | | |
| RNF43 G659Vfs*41 | HLA-B*08:01 | ALGPRMQLCTQ | 1464 |
| RNF43 G659Vfs*41 | HLA-A*31:01 | ALGPRMQLCTQLAR | 1465 |
| RNF43 G659Vfs*41 | HLA-C*12:03; HLA-C*03:03; | ARFFPITPP | 1466 |
| | HLA-C*07:01; HLA-C*07:02 | | |
| RNF43 G659Vfs*41 | HLA-B*27:05; HLA-A*30:01 | ARFFPITPPV | 1467 |
| RNF43 G659Vfs*41 | HLA-B*27:05 | ARFFPITPPVWHIL | 1468 |
| RNF43 G659Vfs*41 | HLA-C*12:03; HLA-C*03:03 | CTQLARFFP | 1469 |
| RNF43 G659Vfs*41 | HLA-B*27:05 | CTQLARFFPI | 1470 |
| RNF43 G659Vfs*41 | HLA-A*02:01 | CTQLARFFPITPPV | 1471 |
| RNF43 G659Vfs*41 | HLA-A*02:01 | FFPITPPV | 1472 |
| RNF43 G659Vfs*41 | HLA-C*12:03; HLA-C*07:02; | FFPITPPVW | 1473 |
| | HLA-C*03:03; HLA-A*24:02 | | |
| RNF43 G659Vfs*41 | HLA-C*03:03; HLA-C*12:03; | FPITPPVWH | 1474 |
| | HLA-B*35:01 | | |
| RNF43 G659Vfs*41 | HLA-B*51:01; HLA-A*02:01; | FPITPPVWHI | 1475 |
| | HLA-B*07:02 | | |
| RNF43 G659Vfs*41 | HLA-C*12:03 | GPRMQLCTQ | 1476 |
| RNF43 G659Vfs*41 | HLA-B*07:02; HLA-B*27:05; | GPRMQLCTQL | 1477 |
| | HLA-B*08:01 | | |
| RNF43 G659Vfs*41 | HLA-A*31:01 | GPRMQLCTQLAR | 1478 |
| RNF43 G659Vfs*41 | HLA-C*12:03; HLA-C*07:02 | GVPPSPPLA | 1479 |
| RNF43 G659Vfs*41 | HLA-B*15:01 | GVPPSPPLAL | 1480 |
| RNF43 G659Vfs*41 | HLA-C*03:03; HLA-C*12:03; | HILGPQRHT | 1481 |
| | HLA-C*07:02 | | |
| RNF43 G659Vfs*41 | HLA-B*08:01 | HPQRKRRG | 1482 |
| RNF43 G659Vfs*41 | HLA-C*12:03; HLA-B*07:02; | HPQRKRRGV | 1483 |
| | HLA-B*08:01; HLA-C*03:03 | | |
| RNF43 G659Vfs*41 | HLA-B*07:02 | HPQRKRRGVP | 1484 |
| RNF43 G659Vfs*41 | HLA-A*24:02 | ILGPQRHT | 1485 |
| RNF43 G659Vfs*41 | HLA-C*12:03; HLA-C*03:03; | ILGPQRHTP | 1486 |
| | HLA-C*07:02 | | |
| RNF43 G659Vfs*41 | HLA-C*12:03; HLA-C*16:01; | ITPPVWHIL | 1487 |
| | HLA-C*07:02; HLA-A*24:02 | | |
| RNF43 G659Vfs*41 | HLA-A*02:01 | KRRGVPPS | 1488 |
| RNF43 G659Vfs*41 | HLA-C*12:03; HLA-C*07:02; | KRRGVPPSP | 1489 |
| | HLA-A*30:01; HLA-C*07:01 | | |
| RNF43 G659Vfs*41 | HLA-C*03:03; HLA-C*03:04; | LALGPRMQL | 1490 |
| | HLA-C*16:01; HLA-C*12:03; | | |
| | HLA-B*07:02 | | |
| RNF43 G659Vfs*41 | HLA-B*27:05 | LALGPRMQLCTQL | 1491 |
| RNF43 G659Vfs*41 | HLA-C*12:03; HLA-C*03:03; | LARFFPITP | 1492 |
| | HLA-A*30:01 | | |
| RNF43 G659Vfs*41 | HLA-C*03:03; HLA-C*12:03 | LCTQLARFF | 1493 |
| RNF43 G659Vfs*41 | HLA-C*12:03; HLA-C*07:02 | LGPRMQLCT | 1494 |
| RNF43 G659Vfs*41 | HLA-B*27:05 | LGPRMQLCTQL | 1495 |
| RNF43 G659Vfs*41 | HLA-A*31:01 | LGPRMQLCTQLAR | 1496 |
| RNF43 G659Vfs*41 | HLA-A*31:01; HLA-C*12:03; | MQLCTQLAR | 1497 |
| | HLA-C*03:03 | | |
| RNF43 G659Vfs*41 | HLA-B*15:01; HLA-B*18:01; | MQLCTQLARF | 1498 |
| | HLA-B*35:01 | | |
| RNF43 G659Vfs*41 | HLA-B*15:01 | MQLCTQLARFF | 1499 |
| RNF43 G659Vfs*41 | HLA-B*13:02 | MQLCTQLARFFPI | 1500 |
| RNF43 G659Vfs*41 | HLA-C*12:03; HLA-C*03:03; | PITPPVWHI | 1501 |
| | HLA-C*07:02 | | |
| RNF43 G659Vfs*41 | HLA-A*31:01 | PITPPVWHILGPQR | 1502 |
| RNF43 G659Vfs*41 | HLA-C*03:03; HLA-C*12:03; | PLALGPRMQ | 1503 |
| | HLA-C*07:02 | | |
| RNF43 G659Vfs*41 | HLA-C*03:03; HLA-C*12:03; | PPLALGPRM | 1504 |
| | HLA-B*35:01 | | |
| RNF43 G659Vfs*41 | HLA-C*03:03; HLA-C*12:03 | PPSPPLALG | 1505 |
| RNF43 G659Vfs*41 | HLA-B*07:02 | PPSPPLALGPRMQL | 1506 |
| RNF43 G659Vfs*41 | HLA-C*12:03; HLA-C*03:03 | PPVWHILGP | 1507 |
| RNF43 G659Vfs*41 | HLA-B*08:01 | PQRKRRGV | 1508 |
| RNF43 G659Vfs*41 | HLA-C*12:03 | PQRKRRGVP | 1509 |
| RNF43 G659Vfs*41 | HLA-B*15:01 | PQRKRRGVPP | 1510 |
| RNF43 G659Vfs*41 | HLA-C*07:02; HLA-C*12:03; | PRMQLCTQL | 1511 |
| | HLA-C*06:02; HLA-C*03:03; | | |
| | HLA-C*07:01; HLA-B*27:05 | | |
| RNF43 G659Vfs*41 | HLA-B*27:05 | PRMQLCTQLA | 1512 |
| RNF43 G659Vfs*41 | HLA-A*31:01 | PRMQLCTQLAR | 1513 |
| RNF43 G659Vfs*41 | HLA-C*12:03; HLA-C*15:02 | PSPPLALGP | 1514 |
| RNF43 G659Vfs*41 | HLA-B*07:02 | PSPPLALGPRMQL | 1515 |
| RNF43 G659Vfs*41 | HLA-C*12:03; HLA-C*03:03 | PVWHILGPQ | 1516 |
| RNF43 G659Vfs*41 | HLA-B*08:01; HLA-A*02:01 | QLARFFPI | 1517 |
| RNF43 G659Vfs*41 | HLA-C*03:03; HLA-C*12:03 | QLARFFPIT | 1518 |
| RNF43 G659Vfs*41 | HLA-B*15:01 | QLARFFPITP | 1519 |
| RNF43 G659Vfs*41 | HLA-A*02:01 | QLARFFPITPPV | 1520 |
| RNF43 G659Vfs*41 | HLA-A*02:01 | QLARFFPITPPVW | 1521 |
| RNF43 G659Vfs*41 | HLA-C*12:03; HLA-B*15:01; | QLCTQLARF | 1522 |
| | HLA-C*03:03; HLA-C*05:01 | | |
| RNF43 G659Vfs*41 | HLA-B*15:01 | QLCTQLARFF | 1523 |
| RNF43 G659Vfs*41 | HLA-C*12:03; HLA-C*03:03; | QRKRRGVPP | 1524 |
| | HLA-C*07:02; HLA-B*14:02 | | |
| RNF43 G659Vfs*41 | HLA-B*27:05 | QRKRRGVPPS | 1525 |
| RNF43 G659Vfs*41 | HLA-B*27:05 | QRKRRGVPPSP | 1526 |
| RNF43 G659Vfs*41 | HLA-C*12:03; HLA-A*30:01; | RFFPITPPV | 1527 |
| | HLA-C*16:01; HLA-C*07:02; | | |
| | HLA-A*02:01; HLA-C*03:03; | | |
| | HLA-A*31:01; HLA-A*32:01 | | |
| RNF43 G659Vfs*41 | HLA-A*24:02; HLA-B*15:01; | RFFPITPPVW | 1528 |
| | HLA-A*29:02 | | |
| RNF43 G659Vfs*41 | HLA-A*24:02 | RFFPITPPVWHIL | 1529 |
| RNF43 G659Vfs*41 | HLA-C*03:03; HLA-C*07:02; | RGVPPSPPL | 1530 |
| | HLA-C*16:01; HLA-C*12:03; | | |
| | HLA-C*03:04; HLA-C*15:02; | | |
| | HLA-A*30:01 | | |
| RNF43 G659Vfs*41 | HLA-C*12:03; HLA-A*30:01; | RKRRGVPPS | 1531 |
| | HLA-C*07:02 | | |
| RNF43 G659Vfs*41 | HLA-B*07:02 | RKRRGVPPSP | 1532 |
| RNF43 G659Vfs*41 | HLA-C*12:03; HLA-A*30:01; | RMQLCTQLA | 1533 |
| | HLA-A*02:01 | | |
| RNF43 G659Vfs*41 | HLA-A*31:01; HLA-A*03:01; | RMQLCTQLAR | 1534 |
| | HLA-B*27:05; HLA-A*11:01 | | |
| RNF43 G659Vfs*41 | HLA-A*02:01; HLA-A*32:01; | RMQLCTQLARFFPI | 1535 |
| | HLA-B*27:05 | | |
| RNF43 G659Vfs*41 | HLA-A*24:02 | RRGVPPSP | 1536 |
| RNF43 G659Vfs*41 | HLA-C*12:03; HLA-C*03:03; | RRGVPPSPP | 1537 |
| | HLA-C*07:01; HLA-C*07:02 | | |
| RNF43 G659Vfs*41 | HLA-B*27:05 | RRGVPPSPPL | 1538 |
| RNF43 G659Vfs*41 | HLA-B*07:02 | SPPLALGP | 1539 |
| RNF43 G659Vfs*41 | HLA-C*12:03 | SPPLALGPR | 1540 |
| RNF43 G659Vfs*41 | HLA-B*07:02 | SPPLALGPRM | 1541 |
| RNF43 G659Vfs*41 | HLA-B*08:01; HLA-B*51:01 | SPPLALGPRMQ | 1542 |
| RNF43 G659Vfs*41 | HLA-B*07:02 | SPPLALGPRMQL | 1543 |
| RNF43 G659Vfs*41 | HLA-B*07:02 | SPPLALGPRMQLC | 1544 |
| RNF43 G659Vfs*41 | HLA-B*07:02 | SPPLALGPRMQLCT | 1545 |
| RNF43 G659Vfs*41 | HLA-B*07:02 | TPPVWHIL | 1546 |
| RNF43 G659Vfs*41 | HLA-C*12:03 | TPPVWHILG | 1547 |
| RNF43 G659Vfs*41 | HLA-B*08:01 | TPPVWHILGPQ | 1548 |
| RNF43 G659Vfs*41 | HLA-C*03:03; HLA-A*02:01; | TQLARFFPI | 1549 |
| | HLA-C*12:03; HLA-A*32:01; | | |
| | HLA-B*13:02; HLA-B*08:01; | | |
| | HLA-A*24:02; HLA-C*16:01; | | |
| | HLA-B*27:05; HLA-B*15:01 | | |
| RNF43 G659Vfs*41 | HLA-B*15:01 | TQLARFFPIT | 1550 |
| RNF43 G659Vfs*41 | HLA-A*02:01 | TQLARFFPITPPV | 1551 |
| RNF43 G659Vfs*41 | HLA-C*12:03; HLA-B*07:02; | VPPSPPLAL | 1552 |
| | HLA-B*35:01; HLA-C*03:03; | | |
| | HLA-C*07:02 | | |
| RNF43 G659Vfs*41 | HLA-C*12:03; HLA-C*03:03; | VWHILGPQR | 1553 |
| | HLA-A*31:01; HLA-C*07:02 | | |
| RNF43 G659Vfs*41 | HLA-C*03:03; HLA-C*12:03; | WHILGPQRH | 1554 |
| | HLA-C*07:02 | | |

[0554] In highly aggressive midline gliomas, a recurrent point mutation in the histone-3 gene (H3F3A) causes an amino acid change from lysine to methionine at position 27 (K27M). Ochs et al. (2017) Oncoimmunology 6(7): e1328340, incorporated by reference in its entirety herein) have shown that a peptide vaccine against K27M-mutant histone-3 is capable of inducing effective, mutation-specific, cytotoxic T-cell- and T-helper-1-cell-mediated immune responses in a major histocompatibility complex (MHC)-humanized mouse model. Accordingly, in some embodiments, the exogenous antigenic polypeptide comprises the neoantigen polypeptide H3F3A (K27M).

[0555] In some embodiments, the cancer is a cancer associated with an oncogenic virus, for example Epstein Barr virus (EBV), hepatitis B and C (HBV and HCV), human papilloma virus (HPV), Kaposi sarcoma virus (KSV), and polyoma viruses. In other certain embodiments, the cancer is a cancer where retrovirus epitopes are identified. Cancers which are associated with a virus and which may be treated using the methods of the disclosure include, but are not limited to, cervical cancer, head and neck cancer, lymphomas, and kidney clear cell carcinoma.

[0556] HLA molecules are required for the immune recognition and subsequent killing of neoplastic cells by the immune system, as tumor antigens must be presented in an HLA-restricted manner to be recognized by T-cell receptors. Some tumor cells use aberrant expression of non-classical HLA-I molecules (HLA-E and HLA-G), which function as inhibitor ligands for immune-competent cells, to escape immune recognition and facilitate tumor immune escape (Moreau et al. (2002) Cell. Mol. Life Sci. 59(9): 1460-6, incorporated by reference in its entirety herein). HLA class I histocompatibility antigen, alpha chain G (HLA-G) is a non-classical MHC class I molecule comprising a heavy a chain comprising one of more of alpha1, alpha2, and alpha3 domains.

[0557] In some embodiments, an engineered erythroid cell or enucleated cell comprises a wild-type or loadable antigen presenting polypeptide and an exogenous antigenic polypeptide, wherein the exogenous antigenic polypeptide is an HLA-G-derived polypeptide. In some embodiments, the HLA-G derived polypeptides are selected from the polypeptides shown below:

(SEQ ID NO: 1555)
HLA-G₁₄₆₋₁₅₄ - DYLALNEDL
(SEQ ID NO: 1556)
HLA-G₁₉₄₋₂₀₂ - RYLENGKEM
(SEQ ID NO: 1557)
HLA-G₁₃₉₋₁₄₈ - RYAYDGKDYL
(SEQ ID NO: 1558)
HLA-G₁₄₁₋₁₅₀ - AYDGKDYLAL

[0558] In some embodiments, the peptides shown above bind to the a specific HLA-A allele: HLA-A*24:02 (e.g., HLA-A*24:02:01:01). Therefore, in some embodiments, the wild-type or loadable antigen-presenting polypeptide comprises an HLA-A*24:02 allele (e.g., a HLA-A*24:02:01:01 allele). In some embodiments, the peptides shown above bind to other HLA class I or class II alleles described herein.

[0559] In one particular embodiment, an engineered erythroid cell or enucleated cell comprises at least one exogenous antigenic polypeptide, PR1, a HLA-A2 restricted peptide, fused to a wild-type or loadable exogenous antigen-presenting polypeptide comprising an HLA-A2 polypeptide, fused to the GPA transmembrane domain (PR1-HLA-A2-GPA). In some embodiments, the HLA-A2 polypeptide does not comprise an endogenous transmembrane domain. In some embodiments, the erythroid cell is an enucleated cell. In some embodiments, the erythroid cell is a nucleated cell.

[0560] In certain embodiments, the engineered erythroid cells or enucleated cells of the disclosure are used to treat highly vascularized tumors. Without being bound by theory, greater vascularization renders the tumors more accessible to the engineered erythroid cells or enucleated cells. Tumor vascularity can be measured, for example, by intercapillary distance (thought to reflect tumor oxygenation) and microvessel density (provides a histological assessment of tumor angiogenesis). A highly vascular tumor can be any tumor of vascular origin, for example a hemangioma, a lymphangioma, a hemangioendothelioma, Kaposi sarcoma, an angiosarcoma, a hemangioblastoma.

[0561] In other embodiments, the engineered erythroid cells or enucleated cells of the disclosure are used to treat tumors with leaky vasculature. There is general agreement that blood vessels in tumors are abnormal. One manifestation of this abnormality is a defective and leaky endothelium. Blood vessel leakiness not only influences the internal environment of tumors and perhaps the rate of angiogenesis, but it also governs access of therapeutics. Without being bound by theory, a more leaky blood vessel would provide more access to the engineered erythroid cells or enucleated cells.

[0562] Autoimmune Diseases

[0563] In certain embodiments, the engineered erythroid cells or enucleated cells of the present disclosure provide a novel and improved method of treating autoimmune diseases. The methods provided for treating autoimmune diseases have numerous advantages, including, for example, effective presentation of antigen on the surface of a cell (e.g., an engineered erythroid cell or enucleated cell) together with a wild-type or loadable exogenous antigen-presenting polypeptide, and the extremely long half-life of engineered erythroid cells or enucleated cells in circulation, thus providing extended exposure to the properly presented antigen.

[0564] In some embodiments, provided herein are methods of treating an autoimmune disease in a subject in need thereof, wherein the method comprises administering to a subject engineered erythroid cells or enucleated cells (or a pharmaceutical composition comprising the cells), wherein the engineered erythroid cells or enucleated cells comprise a first exogenous polypeptide comprising an wild-type or loadable exogenous antigen-presenting polypeptide and a second exogenous polypeptide comprising an exogenous antigenic polypeptide, wherein the exogenous antigenic polypeptide comprises or consists of an antigen associated with or that is the cause or trigger of the autoimmune disease, thereby treating the autoimmune disease. In some embodiments, provided herein are methods of treating an autoimmune disease in a subject in need thereof, wherein the method comprises administering to a subject engineered erythroid cells or enucleated cells (or a pharmaceutical composition comprising the cells), wherein the engineered erythroid cells or enucleated cells comprise a first exogenous polypeptide comprising an wild-type or loadable exogenous antigen-presenting polypeptide and a second exogenous polypeptide comprising an exogenous antigenic polypeptide, wherein the exogenous antigenic polypeptide comprises or consists of an amino acid sequence set forth in Tables 18, 19, 20 and B, or a fragment thereof, thereby treating the autoimmune disease. In some embodiments, the wild-type or loadable exogenous antigen-presenting polypeptide is bound (e.g., covalently or non-covalently attached) to the exogenous antigenic polypeptide. In some embodiments, the wild-type or loadable exogenous antigen-presenting polypeptide is not bound (e.g., covalently or non-covalently attached) to the exogenous antigenic polypeptide (e.g., are two independent polypeptides). In some embodiments, the engineered erythroid cell or enucleated cell further comprises an additional exogenous polypeptide, wherein the additional exogenous polypeptide provided herein (e.g., an exogenous polypeptide comprising at least one costimulatory polypeptide).

[0565] Any antigen associated (or fragment thereof) with or that is the cause or trigger of an autoimmune disease can be included in an exogenous antigenic polypeptide on the cells described herein. For example, the antigen may be a self-antigen to which the autoimmune response is directed. In some embodiments, the exogenous antigenic polypeptide comprises or consists of a self-antigen. In some embodiments, the exogenous antigenic polypeptide comprises or consists of antigen listed in Table 18, or an antigenic-portion thereof. In some embodiments, the exogenous antigenic polypeptide comprises or consists of an antigen listed in Table 19, or an antigenic-portion thereof. In some embodiments, the exogenous antigenic polypeptide comprises or consists of an antigens listed in Table 20, or an antigenic-portion thereof. In the provided methods for treating an autoimmune disorder, where the engineered erythroid cell or enucleated cell comprises a wild-type or loadable exogenous antigen-presenting polypeptide and an exogenous antigenic polypeptide comprising an antigen listed in Tables 18, 19 or 20, or antigenic-portion thereof, the engineered erythroid cell or enucleated cell may be administered to a subject to treat the autoimmune disorder corresponding to the antigen as provided in Tables 18, 19 or 20.

[0566] In one aspect, the engineered erythroid cells or enucleated cells are designed to suppress undesired T cell activity associated with or driving the autoimmune disorder. Thus, in some embodiments, the engineered erythroid cell or enucleated cell further comprises at least one exogenous co-inhibitory polypeptide as described herein. In some embodiments, the exogenous co-inhibitory polypeptide is selected from the co-inhibitory polypeptides listed in Table 10, or fragments thereof In some embodiments, the exogenous co-inhibitory polypeptide is selected from IL-35, IL-10, VSIG-3, and a LAG3 agonist, or a fragment thereof. In some embodiments, the co-inhibitory polypeptide suppresses an autoreactive T cell.

[0567] In another aspect, the engineered erythroid cells or enucleated cells are designed to stimulate T regulatory cells, thereby biasing the immune system back to a more tolerogenic state. Thus, in some embodiments, the engineered erythroid cell or enucleated cell further comprises at least one exogenous costimulatory polypeptide as described herein. In some embodiments, the at least one exogenous costimulatory polypeptide expands regulatory T-cells (Tregs) and is, e.g., an exogenous Treg costimulatory polypeptide as described herein. In some embodiments, the exogenous costimulatory polypeptide comprises or consists of a costimulatory polypeptide listed in Table 12, or fragments thereof. In some embodiments, the exogenous costimulatory polypeptide comprises or consists of a costimulatory polypeptide listed in Table 13, or fragments thereof.

[0568] In yet another aspect, the engineered erythroid cells or enucleated cells are designed to expand and stimulate T cells, e.g., cytotoxic CD8+ T cells. In this aspect, the autoimmune disorder is preferably an autoimmune disorder caused or triggered by an infectious agent. In some embodiments, the engineered erythroid cell or enucleated cell further comprises at least one exogenous costimulatory polypeptide as described herein. In some embodiments, the at least one exogenous costimulatory polypeptide expands cytotoxic CD8+ T cells. In some embodiments, the exogenous costimulatory polypeptide comprises or consists of a costimulatory polypeptides listed in Table 9, or fragments thereof. In some embodiments, the costimulatory polypeptides is selected from the group consisting of 4-1BBL, LIGHT, anti CD28, CD80, CD86, CD70, OX40L, IL-7, IL-12, GITRL, TIM4, SLAM, CD48, CD58, CD83, CD155, CD112, IL-15Ra fused to IL-15, IL-21, ICAM-1, a ligand for LFA-1, anti CD3, and fragments thereof, and a combination thereof.

[0569] In some aspects, the disclosure provides a method of treating a subject having an autoimmune disease, comprising administering to the subject an effective number of the erythroid cells described herein to the subject, thereby treating the autoimmune disease. In various embodiments, the autoimmune disease may be an autoimmune disease provided in Tables 18, 19, 20, or B. In such methods, the engineered erythroid cell or enucleated cell useful for treating the autoimmune disorder comprises a wild-type or loadable exogenous antigen-presenting polypeptide and an antigenic polypeptide, wherein the antigenic polypeptide may be an antigen listed in Tables 17, 18, 19, or B, or antigenic-portion thereof, wherein the engineered erythroid cell or enucleated cell comprising the antigen as provided in Tables, 17, 18, 19, or B is used to treat the corresponding autoimmune disorder listed in Tables 17, 18, 19, or B.

[0570] In some embodiments, the erythroid cell is an enucleated cell. In some embodiments, the erythroid cell is a nucleated cell.

[0571] In some embodiments, the autoimmune disease is a single antigen disease. Examples of single antigen diseases and their related antigens are shown in Table 18, below.

TABLE 18
Autoimmune diseases and associated single antigens

| Disease | Antigen |
|---|---|
| Neuromyelitis Optica (NMO) | Aquaporin 4 (AQP4) |
| Myasthenia Gravis (MG) | Acetylcholine receptor (AchR) |
| Membranous glomerulonephritis | Phospholipase A2 receptor (PLA2R) |
| Pemphigus Vulgaris (PV) | desmoglein 3 (DSG3) |
| Pemphigus Foliaceus (PF) | desmoglein 1 (DSG1) |

[0572] In another embodiments, the autoimmune disease is a multi-antigen disease. In some embodiments wherein the autoimmune disease is a multi-antigen disease, the subject may be treated with engineered erythroid cells or enucleated cells targeting more than one, e.g., two, three, four or more, of the antigens (e.g., including more than one exogenous antigenic polypeptide comprising the antigens). It will be recognized by the skilled artisan that the multiple antigens may be present on the same engineered erythroid cell or enucleated cell, or they may be present on distinct engineered erythroid cells or enucleated cells (e.g., a combination of the two, three, four or more distinct engineered erythroid cells or enucleated cells each comprising an exogenous antigenic polypeptide comprising a single antigen) are administered to the subject to treat the disorder. Examples of multi-antigen diseases and their related antigens are shown in Table 19, below.

TABLE 19
Autoimmune diseases and associated multi-antigens

| Disease | Antigen |
|---|---|
| Type I diabetes mellitus (T1DM) | Insulin/proinsulin/preproinsulin |
| Type I diabetes mellitus (T1DM) | glutamate decarboxylase (GAD65) |
| Type I diabetes mellitus (T1DM) | insulinoma antigen-2 (IA-2) |
| Multiple Sclerosis (MS) | myelin oligodendrocyte glycoprotein (MOG) |
| Multiple Sclerosis (MS) | myelin basic protein (MBP) |
| Multiple Sclerosis (MS) | proteolipid protein (PLP) |
| anti-phospholipid syndrome (APS)/ CAPS | beta-2 glycoprotein 1 (b2GP1) |
| celiac disease | A-gliadin |

[0573] In certain embodiments, the autoimmune disease is selected from the group consisting of pemphigus vulgaris, myasthenia gravis, neuromyelitis optica, bullous pemphigoid, celiac disease multiple sclerosis, type 1 diabetes, rheumatoid arthritis, and membranous glomerulonephritis.

[0574] In some embodiments, also provided are methods of treating celiac disease in a subject in need thereof, wherein the method comprises administering to a subject engineered erythroid cells or enucleated cells (or a pharmaceutical composition comprising the cells), wherein the engineered erythroid cells or enucleated cells comprise a first exogenous polypeptide comprising an wild-type or loadable exogenous antigen-presenting polypeptide and a second exogenous polypeptide comprising an exogenous antigenic polypeptide, wherein the exogenous antigenic polypeptide comprises or consists of an antigen amino acid sequence set forth in Table B, or a fragment thereof, thereby treating the celiac disease. In some embodiments, the wild-type or loadable exogenous antigen-presenting polypeptide comprises a HLA-DQα polypeptide, or a fragment thereof, and a HLA-DQβ polypeptide, or a fragment thereof, wherein the HLA-DQα polypeptide and the HLA-DQβ polypeptide comprise the following allele combinations, represented as HLA-DQα allele: HLA-DQβ allele: DQA1*05:01:DQB1*2:01; DQA1*2:01:DQB1*2:02; DQA1*03:02:DQB1*2:02; DQA1*3:01:DQB1*4:02; DQA1*03:02:DQB1*4:02; DQA1*4:01:DQB1*4:02; DQA1*1:01:DQB1*5:01; DQA1*1:02:DQB1*5:01; DQA1*1:03:DQB1*5:01; DQA1*1:04:DQB1*5:01; DQA1*1:02:DQB1*5:02; DQA1*1:03:DQB1*5:02; DQA1*1:04:DQB1*5:03; DQA1*1:02:DQB1*5:04; DQA1*1:03:DQB1*6:01; DQA1*1:02:DQB1*6:02; DQA1*1:03:DQB1*6:02; DQA1*1:04:DQB1*6:02; DQA1*1:02:DQB1*6:03; DQA1*1:03:DQB1*6:03; DQA1*1:02:DQB1*6:04; DQA1*1:02:DQB1*6:09; DQA1*2:01:DQB1*3:01; DQA1*3:01:DQB1*3:01; DQA1*03:03:DQB1*3:01; DQA1*3:01:DQB1*3:04; DQA1*03:02:DQB1*3:04; DQA1*4:01:DQB1*3:01; DQA1*05:05:DQB1*3:01; DQA1*6:01:DQB1*3:01; DQA1*3:01:DQB1*3:02; DQA1*03:02:DQB1*3:02; DQA1*02:01:DQB1*3:03; DQA1*3:02:DQB1*3:03; DQA1*03:01:DQB1*03:02; DQA1*03:02:DQB1*03:02; DQA1*04:01:DQB1*03:02 and DQA1*05:03:DQB1*03:02. In some embodiments, the wild-type or loadable exogenous antigen-presenting polypeptide comprises a HLA-DQα polypeptide, or a fragment thereof, and a HLA-DQβ polypeptide, or a fragment thereof, wherein the HLA-DQα polypeptide and the HLA-DQβ polypeptide comprise the allele combination provided in Table B, and the exogenous antigenic polypeptide comprises a corresponding antigen amino acids sequence provided in Table B

TABLE B
Antigens for Celiac

| Class II HLA | | |
|---|---|---|
| polypeptides | Antigen Source | Antigen |
| DQA1*05:01: DQB1*2:01 | α-gliadin | PFPQPELPY (SEQ ID NO: 1559); |
| (DQ2.5) | | PQPELPYPQ (SEQ ID NO: 1560); |
| | | PYPQPELPY (SEQ ID NO: 1561); |
| | | FRPEQPYPQ (SEQ ID NO: 1562) |
| | γ-gliadin | PQQSFPEQQ (SEQ ID NO: 1563); |
| | | QQPEQPYPQ (SEQ ID NO: 1564); |
| | | IQPEQPAQL (SEQ ID NO: 1565); |
| | | SQPEQEFPQ (SEQ ID NO: 1566); |
| | | PQPEQEFPQ (SEQ ID NO: 1567); |
| | | PQPEQPFCQ (SEQ ID NO: 1568); |
| | | QQPEQPFPQ (SEQ ID NO: 1569); |
| | | LQPEQPFPQ (SEQ ID NO: 1570); |
| | | QQPFPEQPQ (SEQ ID NO: 1571) |
| | ω-gliadin | PFPQPEQPF (SEQ ID NO: 1572); |
| | | PQPEQPFPW (SEQ ID NO: 1573) |
| | low molecular | PFSEQEQPV (SEQ ID NO: 1574) |
| | weight (LMW) | |
| | glutenin | |
| | LMW glutenin | FSQQQESPF (SEQ ID NO: 1575) |
| | hordein | PFPQPEQPF (SEQ ID NO: 1572); |
| | | PIPEQPQPY (SEQ ID NO: 1576); |
| | | PQPEQPFPQ (SEQ ID NO: 1577); |
| | | PYPEQPQPY (SEQ ID NO: 1578) |
| | secalin | PFPQPEQPF (SEQ ID NO: 1572); |
| | | PFPEQPEQI (SEQ ID NO: 1579); |
| | | PQPEQPFPQ (SEQ ID NO: 1577) |
| | avenin | PYPEQEEPF (SEQ ID NO: 1580); |
| | | PYPEQEQPI (SEQ ID NO: 1581); |
| | | PYPEQEQPF (SEQ ID NO: 1582) |
| DQA1*2:01: DQB1*2:02 | LMW glutenin | PFSEQEQPV (SEQ ID NO: 1574) |
| (DQ2.2) | α-gliadin | QGSVQPQQL (SEQ ID NO: 1583); |
| | | QYSQPEQPI (SEQ ID NO: 1584) |
| DQA1*02:01: DQB1*3:03; | α-gliadin | EGSFQPSQE (SEQ ID NO: 1585) |
| DQA1*3:02: DQB1*3:03; | | EQPQQPFPQ (SEQ ID NO: 1586); |
| DQA1*03:01: DQB1*03:02 | γ-gliadin | EQPQQPYPE (SEQ ID NO: 1587); |
| DQA1*03:02: DQB1*03:02 | | PQQSFPEQE (SEQ ID NO: 1588) |
| DQA1*04:01: DQB1*03:02 | high molecular | QGYYPTSPQ (SEQ ID NO: 1589) |
| DQA1*05:03: DQB1*03:02 | weight (HMW) | |
| (DQ8) | glutenin | |
| DQA1*05:03: DQB1*03:02 | α-gliadin | EGSFQPSQE (SEQ ID NO: 1585) |
| (DQ8.5) | γ-gliadin | PQQSFPEQE (SEQ ID NO: 1588) |
| | HMW glutenin | QGYYPTSPQ (SEQ ID NO: 1589) |

[0575] In some embodiments, the autoimmune disease is selected from those listed in Table 20, below.

TABLE 20
Antigens for MS, Type 1 Diabetes, RA, and Membranous Nephritis

| Disease | Known antigen |
|---|---|
| Acute rheumatic fever | cross reactive antibodies to cardiac muscle |
| alopecia areata | Trychohyalin, keratin 16 |
| ANCA-associated vasculitis | Neutrophil cytoplasmic antigen, proteinase 3, |
| | myeloperodixase, bacterial permeability increasing factor |
| autoimmune gastritis | H, K adenosine triphosphatase |
| Autoimmune hemolytic | Rh blood group antigens, 1 antigen |
| Anemia | |
| autoimmune hepatitis | nuclear protein, liver-kidney microsome type 1, liver cytosol |
| | type 1 |
| autoimmune myocarditis | cardiac myosin |
| Autoimmune thyroiditis | Thyroid peroxidase, thyroglobulin, thyroid-stimulating |
| | hormone receptor |
| Autoimmune uveitis | Retinal arrestin (S-antigen) |
| dermatomyositis | Mi2 ATPase |
| diabetes (type 1) | Pancreatic beta cell antigen |
| good pasture's syndrome | Noncollagenous domain of basement membrane collagen |
| | type IV |
| Graves' disease | Thyroid stimulating hormone receptor |
| Guillain-Barré syndrome | Neurofascin-18G, gliomedin, nodal adhesion molecules |
| Hypoglycemia | Insulin receptor |
| Idiopathic thrombocytopenic | Platelet integrin Gpllb, Gpllla |
| purpura | |
| Insulin resistant diabetes | Insulin receptor |
| Membranous nephritis | Phospholipase AZ |
| mixed essential | rheumatoid factor IgG complexes |
| cryoglobulinemia | |
| multiple sclerosis | Myelin basic protein, proteolipid protein, myelin |
| | oligodendrocyte glycoprotein |
| myasthenia gravis | Acetylcholine receptor |
| Myasthenia gravis-MUSC | Muscarinic receptor |
| pemphigus/pemphigoid | Epidermal cadherin |
| pernicious anemia | intrinsic factor (Gastric) |
| polymyositis | nuclear and nucleolar antigen |
| primary biliary cirrhosis | neutrophil nuclear antigen, mitochondrial multienzyme |
| | complex |
| psoriasis | PSO p27 |
| rheumatoid arthritis | rheumatoid factor IgG complexes, synovial joint antigen, |
| | citrullinated protein, carbamylated protein |
| scleroderma/systemic | Scl-86, nucleolar scleroderma antigen |
| sclerosis | |
| Sjogren's syndrome | SS-B, lupus La protein |
| systemic lupus erythematosus | DNAr histones, ribosomes, snRNP, scRNP |
| Vitiligo | VIT-90, VIT-75, VIT-40 |
| Wegener's granulomatosis | neutrophil nuclear antigen |
| Antiphospholipid syndrome | Beta-2 glycoprotein 1 |
| (APS) & catastrophic APS | |
| Chemotherapy induced | Neuronal antigens |
| peripheral neuropathy | |
| Atypical hemolytic uremic | Complement factor H |
| syndrome | |
| Thrombotic | ADAMTS13 |
| thrombocytopenic purpura | |

[0576] In certain embodiments, an engineered erythroid cell or enucleated cell described herein is used to drive tolerance induction in subjects with Type I diabetes. In one particular embodiment, an engineered erythroid cell or enucleated cell comprises a first exogenous polypeptide comprising an wild-type or loadable exogenous antigen-presenting polypeptide and a second exogenous polypeptide comprising an exogenous antigenic polypeptide, wherein the exogenous antigenic polypeptide comprises or consists of insulin B-chain, and in particular, a portion of the insulin B-chain. In certain embodiments, the portion of the insulin B-chain is amino acids 9-23 of insulin B-chain. In some embodiments, the erythroid cell is an enucleated cell. In some embodiments, the erythroid cell is a nucleated cell.

[0577] In some embodiments, the autoimmune disease is a disease of immune activation. Diseases of immune activation also include inflammatory diseases, such as, e.g. Crohn's disease, ulcerative colitis, celiac disease, or other idiopathic inflammatory bowel disease. Diseases of immune activation also include allergic diseases, such as, e.g. asthma, peanut allergy, shellfish allergy, pollen allergy, milk protein allergy, insect sting allergy, and latex allergy, animal dander allergy, black and English walnut allergy, brazil nut allergy, cashew nut allergy, chestnut allergy, dust mite allergy, egg allergy, fish allergy, hazelnut allergy, mold allergy, pollen allergy, grass allergy, shellfish allergy, soy allergy, tree nut allergy and wheat allergy.

[0578] Diseases of immune activation also include immune activation in response to a therapeutic protein administered to treat a primary condition, that lessens the efficacy of therapeutic protein, such as, e.g., clotting factor VIII in hemophilia A, clotting factor IX in hemophilia B, antitumor necrosis factor alpha (TNFa) antibodies in rheumatoid arthritis and other inflammatory diseases, glucocerebrosidase in Gaucher's disease, any recombinant protein used for enzyme replacement therapy, or asparaginase in acute lymphoblastic leukemia (ALL).

[0579] In some embodiments a subject is suffering from an autoimmune disease or condition or a self-antibody mediated disease or condition, in which the subject's immune system is active against an endogenous (self) molecule, for example a protein antigen, such that the immune system attacks the endogenous molecule, induces inflammation, damages tissue, and otherwise causes the symptoms of the autoimmune or self-antibody disease or conditions. The immune response might be driven by antibodies that bind to the endogenous molecule, or it may be driven by overactive T cells that attack cells expressing the endogenous molecule, or it may be driven by other immune cells such as regulatory T cells, NK cells, NKT cells, or B cells. In these embodiments, an antigenic protein or a fragment thereof corresponding to the endogenous (self) molecule may be expressed on an engineered erythroid cell or enucleated cell comprising an erythroid cell, presenting (e.g. comprising on the cell surface) one or more exogenous polypeptides, as described herein. The engineered erythroid cells or enucleated cells, when administered once or more to the subject suffering from the disease or condition, would be sufficient to induce tolerance to the antigenic protein such that it no longer induced activation of the immune system, and thus would treat or ameliorate the symptoms of the underlying disease or condition. In certain embodiments, the engineered erythroid cells or enucleated cells are used to stimulate T regulatory cells, thereby biasing the immune system back to a more tolerogenic state for the endogenous (self) molecule.

[0580] In some embodiments, a subject is suffering from an allergic disease, for example an allergy to animal dander, black walnut, brazil nut, cashew nut, chestnut, dust mites, egg, English walnut, fish , hazelnut, insect venom, latex, milk, mold, peanuts, pollen, grass, shellfish, soy, tree nuts, or wheat. A subject suffering from an allergy may mount an immune response upon contact with the antigenic fragment of the allergen, for example through diet, skin contact, injection, or environmental exposure. The immune response may involve IgE antibody, sensitized mast cells, degranulation, histamine release, and anaphylaxis, as well as canonical immune cells like T cells, B cells, DCs, T regulatory cells, NK cells, neutrophils, and NKT cells. The allergic reaction may cause discomfort or it may be severe enough to cause death, and thus requires constant vigilance on the part of the sufferer as well as his or her family and caretakers. In these embodiments, the antigenic protein or a fragment thereof may be presented on an erythroid cell of the engineered erythroid cell or enucleated cell (e.g., as part of an exogenous antigenic polypeptide described herein). A population of these cells, when administered once or more to the subject suffering from the allergic disease or condition, would be sufficient to induce tolerance to the antigenic protein such that it no longer induced activation of the immune system upon exposure, and thus would treat or ameliorate the symptoms of the underlying allergic disease or condition.

[0581] Autoimmune Diseases Associated with an Infectious Agent

[0582] In some embodiments, the disclosure provides methods for treating an autoimmune disease or disorder associated with or triggered by an infectious agent. Exemplary autoimmune diseases or disorders associated with or triggered by infectious agents are provided in Table 21.

TABLE 21
Autoimmune diseases and associated infectious agents.

| Autoimmune Disease | Infectious Agent(s) |
|---|---|
| Allergic encephalitis | Measles virus |
| Autoimmune kidney disease | Streptococcal infections |
| Chagas disease | Trypanosoma cruzi |
| Chronic autoimmune hepatitis | Hepatitis C virus |
| Guillain-Barré syndrome | Campylobacter jejuni, Cytomegalovirus, |
| | Zika virus |
| Herpetic stromal keratitis | Herpes simplex virus |
| HTLV-associated myelopathy | Human T-cell leukemia virus |
| Lyme arthritis | Borrelia burgdorferi |
| Mixed cryoglobulinemia | Hepatitis C virus |
| Myocarditis | Coxsackie virus B3 |
| Pediatric autoimmune | Streptococcal infections |
| neuropsychiatric disorders | |
| Polyarteritis nodosa | Hepatitis B virus |
| Primary biliary cirrhosis | Escherichia coli |
| Reactive arthritis | Yersinia enterocolitica |
| Reiter's syndrome | Chlamydia trachomatis, Shigella species |
| Rheumatic fever | Streptococcus pyogenes |
| Rheumatic heart disease | Streptococci |
| Rheumatoid arthritis | Normal gut flora |
| Scleroderma | Cytomegalovirus |
| Tourette syndrome | infections |
| Type 1 diabetes | Enterovirus, Rotavirus |
| Type 1 diabetes mellitus | Coxsackie virus B4 |

[0583] Any autoimmune disorder associated with an infectious agent, including without limitation those disorders presented in Table 21, is contemplated to be treated with an engineered erythroid cell or enucleated cell described herein.

[0584] As provided by the present disclosure, an autoimmune disease associated with an infectious agent may be treated by administering to the subject an engineered erythroid cell or enucleated cell comprising a first exogenous polypeptide comprising an wild-type or loadable exogenous antigen-presenting polypeptide and a second exogenous polypeptide comprising an exogenous antigenic polypeptide, wherein the exogenous antigenic polypeptide comprises or consists of an antigen or fragment thereof from the infectious agent (i.e., targeting the specific infectious agent triggering the disease).

[0585] In a particular embodiment, the engineered erythroid cell or enucleated cell useful for treating an autoimmune disorder associated with an infectious agent further comprises an exogenous costimulatory polypeptide. In some embodiments, the exogenous costimulatory polypeptide activates cytotoxic CD8+ T cells in order to target and eliminate cells infected with the infectious agent. For example, the cytotoxic CD8+ T cells may target, suppress and/or eliminate autoreactive B cells infected with the infectious agent. The exogenous costimulatory polypeptide may include costimulatory polypeptide described herein. In some embodiments, the exogenous costimulatory polypeptide expands cytotoxic CD8+ T cells. In some embodiments, the exogenous costimulatory polypeptide comprises or consists of a costimulatory polypeptides listed in Table 9. In some embodiments, the costimulatory polypeptides icomprises or consists of 4-1BBL, LIGHT, anti CD28, CD80, CD86, CD70, OX40L, IL-7, IL-12, GITRL, TIM4, SLAM, CD48, CD58, CD83, CD155, CD112, IL-15Ra fused to IL-15, IL-21, ICAM-1, a ligand for LFA-1, anti CD3, a fragment thereof, and a combination thereof.

[0586] In some embodiments, the autoimmune disease associated with an infectious agent is multiple sclerosis (MS). Several infectious agents have been associated with MS. Exemplary infectious agents associated with MS are provided in Table 22. In some embodiments, the infectious agent associated with the autoimmune disorder is a virus. In some embodiments, the engineered erythroid cell or enucleated cell for use in the treatment of MS comprise a first exogenous polypeptide comprising an wild-type or loadable exogenous antigen-presenting polypeptide and a second exogenous polypeptide comprising an exogenous antigenic polypeptide, wherein the exogenous antigenic polypeptide comprises or consists of an amino acid sequence set forth in Table 22.

TABLE 22
Infectious agents associated with multiple
sclerosis (MS)

| Infectious Agent | Antigenic polypeptides |
|---|---|
| Borna virus | |
| Coronavirus | |
| Cytomegalovirus | |
| EBV | VLQWASLAV (SEQ ID NO: 868), |
| | FMVFLQTHI (SEQ ID NO: 869), |
| | FLQTHIFAEV (SEQ ID NO: 870), |
| | or |
| | SIVCYFMVFL (SEQ ID NO: 871) |
| Hepatitis B virus | |
| Herpes simplex virus, | |
| type 1 | |
| Herpes simplex virus, | |
| type 2 | |
| HHV-6 | PRTPPPS (SEQ ID NO: 1590) |
| HTLV-1 | |
| Influenza A virus | |
| LM7 virus | |
| Measles virus | |
| MS1533 | |
| MSRV (HERV-W) | |
| Parainfluenza virus 1 | |
| Rabies virus | |
| Rubella virus | |
| Scrapie agent | |
| Simian virus 5 | |
| SMON-like | virus |
| Tick borne | |
| encephalitis virus | |
| Torque Teno virus | |
| VZV | |

[0587] In some embodiments, the present disclosure provides a method of treating a subject having MS, comprising administering to the subject an effective number of engineered erythroid cells or enucleated cells comprise a first exogenous polypeptide comprising an wild-type or loadable exogenous antigen-presenting polypeptide and a second exogenous polypeptide comprising an exogenous antigenic polypeptide, wherein the exogenous antigenic polypeptide comprises or consists of an antigen from an infectious agent listed in Table 22, or an immunogenic peptide thereof, thereby treating the MS. In some embodiments, the engineered erythroid cells or enucleated cells further comprise an exogenous costimulatory polypeptide.

[0588] In a particular embodiment, the infectious agent associated with MS is Epstein-Barr virus (EBV). While not wishing to be bound by any particular theory, it is believed that during primary infection, EBV infects autoreactive naive B cells in tonsils driving them to enter germinal centers where they proliferate intensely and differentiate into latently infected autoreactive memory B cells, which then exit from the tonsils and circulate in the blood. The number of EBV-infected B cells is normally controlled by EBV-specific cytotoxic CD8+ T cells, which kill proliferating and lytically infected B cells, but not if there is a defect in this defense mechanism. Surviving EBV-infected autoreactive memory B cells enter the CNS where they take up residence and produce oligoclonal IgG and pathogenic autoantibodies, which attack myelin and other components of the CNS. Autoreactive T cells that have been activated in peripheral lymphoid organs by common systemic infections circulate in the blood and enter the CNS where they are reactivated by EBV-infected autoreactive B cells presenting CNS peptides (Cp) bound to major histocompatibility complex (MEW) molecules. These EBV-infected B cells provide costimulatory survival signals (B7) to the CD28 receptor on the autoreactive T cells and thereby inhibit activation-induced T-cell apoptosis, which normally occurs when autoreactive T cells enter the CNS and interact with nonprofessional APCs such as astrocytes and microglia which do not express B7 costimulatory molecules. After the autoreactive T cells have been reactivated by EBV-infected autoreactive B cells, they produce cytokines such as interleukin-2 (IL-2) interferon-γ (IFNγ) and tumor necrosis factor (TNF) and orchestrate an autoimmune attack on the CNS with resultant oligodendrocyte and myelin destruction.

[0589] As provided herein, there are several alternative ways in which an engineered erythroid cell or enucleated cell may be designed and used to treat an autoimmune disease associated with or triggered by an infectious agent in a subject. For example, an autoimmune disease associated with an infectious agent may alternatively be treated by administering to the subject an engineered erythroid cell or enucleated cell comprising a first exogenous polypeptide comprising a wild-type or loadable exogenous antigen-presenting polypeptide, a second exogenous polypeptide comprising an exogenous antigenic polypeptide, and optionally a third exogenous polypeptide comprising at least one co-inhibitory polypeptide, or at least one Treg costimulatory polypeptide (also referred to herein as Treg expansion polypeptide). In some embodiments, the exogenous antigenic polypeptide comprises an antigen, or antigenic fragment thereof, from the infectious agent (i.e., targeting the infectious agent triggering the disease). In some embodiments, the antigen or antigenic fragment thereof is an antigen associated with the infection-induced autoimmune disorder (e.g., a self-polypeptide).

[0590] In some embodiments, as described above more generally for any autoimmune disorder, the engineered erythroid cell or enucleated cell useful for treating an autoimmune disorder associated with an infectious agent further comprises an exogenous Treg costimulatory polypeptide. The exogenous Treg costimulatory polypeptide may be any Treg expansion polypeptide described herein. In an embodiment, the exogenous Treg costimulatory polypeptide induces the expansion of Tregs that, in turn, suppress T cells generated in the subject in response to the infectious agent.

[0591] In some embodiments, as described above more generally for any autoimmune disorder, the engineered erythroid cell or enucleated cell useful for treating an autoimmune disorder associated with an infectious agent comprises an exogenous co-inhibitory polypeptide. The exogenous co-inhibitory polypeptide may comprise or consist of any co-inhibitory polypeptide described herein. In some embodiments, the exogenous co-inhibitory polypeptide suppresses T cells generated in the subject in response to the infectious agent.

[0592] In another embodiment, the autoimmune disease is not associated with an infectious agent. For an autoimmune disease that is not associated with an infectious agent, one of skill in the art will recognize, based on the disclosure elsewhere herein, that the autoimmune disease may be treated by administering to the subject an engineered erythroid cell or enucleated cell comprising a first exogenous polypeptide comprising a wild-type or loadable exogenous antigen-presenting polypeptide, a second exogenous polypeptide comprising an exogenous antigenic polypeptide comprising an antigen or fragment thereof from the endogenous (self) polypeptide to which the autoimmune activity is directed, and a third exogenous polypeptide comprising at least one coinhibitory polypeptide or at least one Treg expansion polypeptide. In these embodiments, the engineered erythroid cells or enucleated cells are administered to the subject in order to induce peripheral tolerance to the antigen triggering the autoimmune response.

[0593] Infectious Diseases

[0594] The engineered erythroid cells or enucleated cells provided herein may be used for the treatment of an infectious disease in a subject in need thereof. Accordingly, in some aspects, the disclosure provides a method of treating a subject having an infectious disease, comprising administering to the subject an effective number or amount of the engineered erythroid cells or enucleated cells described herein to the subject, thereby treating the infectious disease.

[0595] In some embodiments, provided herein are methods of treating an infectious disease in a subject in need thereof, wherein the method comprises administering to a subject engineered erythroid cells or enucleated cells (or a pharmaceutical composition comprising the cells) , wherein the engineered erythroid cells or enucleated cells comprise a first exogenous polypeptide comprising an wild-type or loadable exogenous antigen-presenting polypeptide and a second exogenous polypeptide comprising an exogenous antigenic polypeptide, wherein the exogenous antigenic polypeptide comprises or consists of an antigen from a pathogen or infectious agent, thereby treating the infectious disease. In various embodiments, the antigen is an antigen of a pathogen, e.g., a viral pathogen, a bacterial pathogen, a fungal pathogen, or a parasitic pathogen. In some embodiments, the engineered erythroid cell or enucleated cell comprises a first exogenous polypeptide comprising a wild-type or loadable exogenous antigen-presenting polypeptide, a second exogenous polypeptide comprising an exogenous antigenic polypeptide comprising a first antigen (e.g., first antigen of a pathogen), and the third exogenous polypeptide comprises a second exogenous antigenic polypeptide comprising a second antigen (e.g, second antigen from a pathogen). The two antigens can be derived from two different proteins, or they may be derived from the same protein. For example, in some embodiments, the first antigen or the second antigen is an HPV-E6 antigen. In some embodiments, the first antigen or the second antigen is an HPV-E7 antigen. In some embodiments, the first antigen is an HPV-E6 antigen and the second antigen is an HPV-E7 antigen. In some embodiments, the wild-type or loadable exogenous antigen-presenting polypeptide is bound (e.g., covalently or non-covalently attached) to the exogenous antigenic polypeptide. In some embodiments, the wild-type or loadable exogenous antigen-presenting polypeptide is not bound (e.g., covalently or non-covalently attached) to the exogenous antigenic polypeptide (e.g., are two independent polypeptides). In some embodiments, the engineered erythroid cell or enucleated cell further comprises an additional exogenous polypeptide, wherein the additional exogenous polypeptide provided herein (e.g., an exogenous polypeptide comprising at least one costimulatory polypeptide).

[0596] In certain embodiments, the present disclosure provides an engineered erythroid cell or enucleated cell comprising an erythroid cell (e.g. an enucleated erythroid cell) or an enucleated cell, comprising one or more exogenous polypeptides, wherein one of the one or more exogenous polypeptides comprises an infectious disease therapeutic. In some embodiments, the erythroid cell is an enucleated erythroid cell. In some embodiments, the erythroid cell is a nucleated erythroid cell.

[0597] “Infectious disease therapeutic” as used herein, refers to an exogenous polypeptide which inhibits an infectious disease, e.g., reduces or alleviates a cause or symptom of an infectious disease, or improves a value for a parameter associated with the infectious disease, e.g., viral load or bacterial load. In some embodiments, the infectious disease therapeutic is a first or second exogenous polypeptide, which when present or expressed with the other exogenous polypeptide, inhibits an infectious disease. In an embodiment, a first or second infectious disease therapeutic has activity in the absence of the other. In some embodiments, the infectious disease therapeutic inhibits the infectious disease directly, e.g., by killing pathogens. In some embodiments, the infectious disease therapeutic inhibits the infectious disease by stimulating a subject's immune response, e.g., as a vaccine.

[0598] In some embodiments, the engineered erythroid cell or enucleated cell comprises a first exogenous polypeptide comprising a first infectious disease therapeutic and a second exogenous polypeptide, comprising a second infectious disease therapeutic. In some embodiments, the engineered erythroid cell or enucleated cell comprises a first exogenous polypeptide comprising a first infectious disease therapeutic, a second exogenous polypeptide, comprising a second infectious disease therapeutic, and a third exogenous polypeptide, comprising a third infectious disease therapeutic.

[0599] The first, second and third infectious disease therapeutic can act on the same target, for example a cell surface receptor and/or an endogenous human protein. Alternatively, the first, second and third anti-cancer therapeutic can act on different targets. The first, second or third targets may be members of the same biological pathway, wherein optionally the targets are cell surface receptors, endogenous human proteins. The first, second or third targets may be on different cell types. In some embodiments, the first exogenous polypeptide localizes the engineered erythroid cell to a desired site, e.g., a human cell, and the second exogenous polypeptide has a therapeutic activity, e.g., antigen-presenting activity.

[0600] In certain preferred embodiments, the infectious disease therapeutic is an antigen, e.g., an antigen from a pathogen or infectious agent (where “pathogen” and “infectious agent” are used interchangeably herein). In some embodiments, the first therapeutic is an antigen, e.g., an antigen from a pathogen. In some embodiments, the first therapeutic and second therapeutic is an antigen, e.g., an antigen from a pathogen. In certain embodiments, the first, second and third therapeutic is an antigen, e.g., an antigen from a pathogen.

[0601] In some embodiments, the subject may be treated with engineered erythroid cells or enucleated cells comprising more than one, e.g., two, three, four, five or more, different exogenous antigenic polypeptides. It some embodiments the multiple exogenous antigenic polypeptides may be present on the same engineered enucleated erythroid cell. In some embodiments, the multiple exogenous antigenic polypeptides may be present on two or more distinct engineered enucleated erythroid cells, wherein a combination of the distinct engineered enucleated erythroid cells are administered to the subject to treat the disorder.

[0602] The exogenous antigenic polypeptide may include any pathogenic antigen, or antigenic-portion thereof, known in the art. Exemplary pathogenic antigens which may be included in one or more exogenous antigenic polypeptides on an erythroid cell or enucleated cell described herein are described in detail below, but are not intended to be limiting. In various embodiments, the exogenous antigenic polypeptide includes an antigen from a pathogen provided in any one of Tables 21, 22, 23 and 24 below. It will be recognized by the skilled artisan that an engineered erythroid cell or enucleated cell as provided herein, comprising an exogenous antigenic polypeptide comprising an antigen from a particular pathogen or infectious agent, can be administered to a subject to treat an infection in the subject caused by that pathogen or infectious agent. It will be further recognized by the skilled artisan that an engineered erythroid cell or enucleated cell as provided herein, comprising an exogenous antigenic polypeptide comprising an antigen from a particular pathogen or infectious agent, can be administered to a subject to treat a disease or disorder in the subject, wherein the disease, disorder is caused, directly or indirectly, by infection with that pathogen or infectious agent.

[0603] In some aspects, the disclosure provides an method of treating a subject having an infectious disease, comprising administering to the subject an effective number of the erythroid cells described herein to the subject, thereby treating the infectious disease.

[0604] In another aspect, the present disclosure provides a method of treating a subject having an infectious disease, comprising administering to the subject an effective number of engineered erythroid cells or enucleated cells comprising an erythroid cell (e.g., an enucleated erythroid cell) or an enucleated cell, comprising one or more exogenous polypeptides, wherein one of the one or more exogenous polypeptides comprises a pathogenic antigen, thereby treating the infectious disease.

[0605] In certain embodiments, the infectious disease therapeutic is selected from an antimicrobial polypeptide listed on a publicly available bioinformatic database, such as CAMP, CAMP release 2 (Collection of sequences and structures of antimicrobial peptides), the Antimicrobial Peptide Database (available on the world wide web at aps.unmc.edu/AP/main.php), LAMP, BioPD, and ADAM (A Database of Anti-Microbial peptides) (available on the world wide web at bioinformatics.cs.ntou.edu.tw/adam/). The Antimicrobial peptide databases may be divided into two categories on the basis of the source of peptides it contains, as specific databases and general databases. These databases have various tools for antimicrobial peptides analysis and prediction. For example, CAMP contains AMP prediction, feature calculator, BLAST search, clustalW, VAST, PRATT, Helical wheel etc. In addition, ADAM allows users to search or browse through AMP sequence-structure relationships.

[0606] In certain embodiments, the infectious disease therapeutic is selected from a viral polypeptide. In these embodiments, an engineered erythroid cell or enucleated cell comprises an erythroid cell (e.g., an enucleated erythroid cell) or an enucleated cell, comprising one or more exogenous polypeptides, wherein one of the one or more exogenous polypeptides comprises an antigenic viral polypeptide, and the engineered erythroid cell or enucleated cell is administered to a subject to treat an infection with the virus.

[0607] Viral infections include adenovirus, coxsackievirus, hepatitis A virus, poliovirus, Epstein-Barr virus, herpes simplex type 1, herpes simplex type 2, human cytomegalovirus, human herpesvirus type 8, varicella-zoster virus, hepatitis B virus, hepatitis C viruses, human immunodeficiency virus (HIV), influenza virus, measles virus, mumps virus, parainfluenza virus, respiratory syncytial virus, papillomavirus, rabies virus, and Rubella virus. Other viral targets include Paramyxoviridae (e.g., pneumovirus, morbillivirus, metapneumovirus, respirovirus or rubulavirus), Adenoviridae (e.g., adenovirus), Arenaviridae (e.g., arenavirus such as lymphocytic choriomeningitis virus), Arteriviridae (e.g., porcine respiratory and reproductive syndrome virus or equine arteritis virus), Bunyaviridae (e.g., phlebovirus or hantavirus), Caliciviridae (e.g., Norwalk virus), Coronaviridae (e.g., coronavirus or torovirus), Filoviridae (e.g., Ebola-like viruses), Flaviviridae (e.g., hepacivirus or flavivirus), Herpesviridae (e.g., simplexvirus, varicellovirus, cytomegalovirus, roseolovirus, or lymphocryptovirus), Orthomyxoviridae (e.g., influenza virus or thogotovirus), Parvoviridae (e.g., parvovirus), Picomaviridae (e.g., enterovirus or hepatovirus), Poxviridae (e.g., orthopoxvirus, avipoxvirus, or leporipoxvirus), Retroviridae (e.g., lentivirus or spumavirus), Reoviridae (e.g., rotavirus), Rhabdoviridae (e.g., lyssavirus, novirhabdovirus, or vesiculovirus), and Togaviridae (e.g., alphavirus or rubivirus). Specific examples of these viruses include human respiratory coronavirus, influenza viruses A-C, hepatitis viruses A to G, and herpes simplex viruses 1-9.

[0608] Exemplary viral pathogens are shown below in Table 23. In certain embodiments, the viral pathogen is selected from Hepatitis B virus, Hepatitis C virus, Epstein Barr virs, Cytomegalovirus (CMV).

TABLE 23
Viral Pathogens

| Baltimore | Examples, by Family | |
|---|---|---|
| classification | (Human Host) | Species/Pathology example |
| dsDNA viruses | Adenoviridae | Example - Respiratory infection |
| dsDNA viruses | Polyomaviridae | Example - progressive multifocal |
| | | leukoencephalopathy |
| dsDNA viruses | Papiliomaviradae | Example - betapapilloma virus (warts, malignant |
| | | tumors) |
| dsDNA viruses | Poxviridae | Example - Molluscum contagiosum (skin lesions) |
| dsDNA viruses | Herpesviridae | Example - Varicellovirus (Chickenpox) |
| ssDNA viruses (+strand | Anelloviridae | Asymptomatic, may be associate with hepatitis, |
| or “sense”) DNA | | pulmonary disease, hematological disorders, |
| | | myopathy, lupus |
| ssDNA viruses (+strand | Parvoviridae | Example - Fifth disease |
| or “sense”) DNA | | |
| dsRNA viruses | Reoviridae | Example - Colorado tick fever |
| (e.g. Reoviruses) | | |
| (+)ssRNA viruses | Coronaviridae | Example - Pneumonia, gastroenteritis |
| (+strand or sense) RNA | | |
| (+)ssRNA viruses | Picornaviridae | Example - Myocarditis |
| (+strand or sense) RNA | | |
| (+)ssRNA viruses | Astoviridae | Example - infantile gastroenteritis |
| (+strand or sense) RNA | | |
| (+)ssRNA viruses | Caliciviridae | Example - Norovirus - gastroenteritis |
| (+strand or sense) RNA | | |
| (+)ssRNA viruses | Flaviviridae | Example - Dengue, Zika |
| (+strand or sense) RNA | | |
| (+)ssRNA viruses | Hepeviridae | Example - Hepatitis |
| (+strand or sense) RNA | | |
| (+)ssRNA viruses | Togaviridae | Example - Rubella |
| (+strand or sense) RNA | | |
| (−)ssRNA viruses | Rhabdoviridae | Example - Rabies |
| (−strand or antisense) RNA | | |
| (−)ssRNA viruses | Filoviridae | Example - Ebola, Marburg |
| (−strand or antisense) RNA | | |
| (−)ssRNA viruses | Paramyxoviridae | Example - Mumps |
| (−strand or antisense) RNA | | |
| (−)ssRNA viruses | Pneumoviridae | Example - Respiratory tract infection |
| (−strand or antisense) RNA | | |
| (−)ssRNA viruses | Arenaviridae | Example - Encephalitis, Hemorrhagic fever |
| (−strand or antisense) RNA | | |
| (−)ssRNA viruses | Bunyaviridae | Example - Hantavirus pulmonary syndrome/ |
| (−strand or antisense) RNA | | hemorrhagic fever |
| (−)ssRNA viruses | Deltavirus | Example - hepatitis, cirrhosis |
| (−strand or antisense) RNA | | |
| (−)ssRNA viruses | Orthomyxoviridae | Example - Influenza A, Influenza B |
| (−strand or antisense) RNA | | |
| ssRNA-RT viruses | Retroviridae | Example - lentivirus - HIV |
| (+strand or sense) RNA | | |
| with DNA intermediate | | |
| in life-cycle | | |
| dsDNA-RT viruses | Hepadnaviridae | Example - hepatitis, cirrhosis, hepatocellular |
| | | carcinoma |

[0609] In certain embodiments, the exogenous antigenic polypeptides for use in treating an infectious disease comprise antigens selected from viral, retroviral, and testes antigens. For example, in certain embodiments, the virus is selected from Epstein Barr virus (EBV), hepatitis B (HBV), hepatitis C (HCV), human papilloma virus (HPV), Kaposi sarcoma virus (KSV), and polyoma viruses. In some embodiments, the virus is hepatitis B (HBV).

[0610] In some embodiments, the present disclosure provides a method of treating a subject having a cancer associated with an oncogenic virus (e.g. HPV), comprising administering to the subject an effective number of engineered erythroid cells or enucleated cells, comprising one or more exogenous antigenic polypeptides, wherein one of the one or more exogenous antigenic polypeptides comprises an HPV antigen from Table 8. In some embodiments, the present disclosure provides a method of treating a subject having a cancer associated with an oncogenic virus (e.g. HPV), comprising administering to the subject an effective number of engineered erythroid cells or enucleated cells, comprising one or more exogenous antigenic polypeptides, wherein one of the one or more exogenous antigenic polypeptides comprises an HPV-E7 antigen. In some embodiments, the present disclosure provides a method of treating a subject having a cancer associated with an oncogenic virus (e.g. HPV), comprising administering to the subject an effective number of engineered erythroid cells or enucleated cells, comprising two or more exogenous antigenic polypeptides, wherein the two or more exogenous antigenic polypeptides comprises an HPV-E7 antigen and an HPV-E6 antigen.

[0611] In some embodiments, the present disclosure provides a method of treating a subject having a viral infection, comprising administering to the subject an effective number of engineered erythroid cells or enucleated cells, comprising one or more exogenous antigenic polypeptides, wherein one of the one or more exogenous antigenic polypeptides comprises an antigen from an infectious agent listed in Table 23, or an immunogenic peptide thereof, thereby treating the viral infection. In some embodiments, the engineered erythroid cells or enucleated cells further comprise a wild-type or loadable exogenous antigen-presenting polypeptide, and optionally an exogenous costimulatory polypeptide.

[0612] In some embodiments, the present disclosure provides methods for treating hepatitis B infection, e.g., chronic HBV infection. It is estimated that up to 250 million people worldwide have chronic hepatitis B, which is primarily transmitted in utero or during childbirth. Chronic HBV causes cirrhosis and hepatocellular carcinoma. The pathology of HBV may be due to hepatitis B antigen-specific T cell recruitment of nonantigen-specific T cells, which secrete cytokines causing liver damage. It has been proposed that exhausted T cells are key to the etiology of chronic hepatitis. HBV-specific T cells have been reported to be reactivated by PD1 blockade, e.g., by anti-PD1, and/or IL-12 (Schirdewahn et al. (2017) J. Infect. Dis. 215(1): 139-49; Fisicaro etal. (2010) Gastroenterology 138(2): 682-93, 693.e1-4; and Schurich etal. (2013) PLOS Pathogens 9(3): e1003208; the entire contents of each of which is incorporated herein by reference). Thus, it is envisioned by the present disclosure that engineered erythroid cells or enucleated cells provided herein may be used to treat chronic HBV by reactivating HBV-specific T cells, e.g., for cytolytic or non-cytolytic anti-viral activity.

[0613] Accordingly, in some embodiments, the present disclosure provides a method of treating a subject having a hepatitis B viral (HBV) infection, e.g., chronic hepatitis B, comprising administering to the subject an effective number of engineered erythroid cells or enucleated cells, comprising one or more exogenous antigenic polypeptides, wherein one of the one or more exogenous antigenic polypeptides comprises an HBV-specific antigen, or an immunogenic peptide thereof, thereby treating the HBV infection. In some embodiments, the HBV infection is a chronic HBV infection. In some embodiments, the engineered erythroid cells or enucleated cells further comprise a wild-type or loadable exogenous antigen-presenting polypeptide. In some embodiments, the engineered erythroid cell or enucleated cell further comprises at least one exogenous costimulatory polypeptide. In some embodiments, the at least one exogenous costimulatory polypeptide comprises 4-1BBL, IL-2, IL-12, IL-15, IL-18, IL-21, a fragment thereof, and any combination thereof, e.g., IL-12 and IL-15, or 4-1BBL and IL-15. In some embodiments, the engineered erythroid cell or enucleated cell further comprises an additional exogenous polypeptide, wherein the additional exogenous polypeptide comprises a checkpoint inhibitor. In some embodiments, the checkpoint inhibitor is an antibody molecule to PD1. In a particular embodiment, the engineered erythroid cell or enucleated cell comprises an erythroid cell comprising one or more exogenous polypeptides, wherein the one or more exogenous polypeptides comprise: an exogenous antigenic polypeptide comprising an HBV-specific antigen, or an immunogenic peptide thereof, a wild-type or loadable exogenous antigen-presenting polypeptide, an exogenous costimulatory polypeptide, e.g., comprising IL-12 or 4-1BBL, and an exogenous polypeptide comprising a checkpoint inhibitor, e.g., antibody to PD1.

[0614] In certain embodiments, the infectious disease therapeutic is selected from a bacterial polypeptide. In these embodiments, an engineered erythroid cell or enucleated cell comprises an erythroid cell (e.g., an enucleated erythroid cell) or an enucleated cell, comprising one or more exogenous antigenic polypeptides, wherein one of the one or more exogenous antigenic polypeptides comprises an antigenic bacterial polypeptide, and the engineered erythroid cell or enucleated cell is administered to a subject to treat an infection with the bacteria.

[0615] Bacterial infections include, but are not limited to, Mycobacteria, Rickettsia, Mycoplasma, Neisseria meningitides, Neisseria gonorrheoeae, Legionella, Vibrio cholerae, Streptococci, Staphylococcus aureus, Staphylococcus epidermidis, Pseudomonas aeruginosa, Corynobacteria diphtheriae, Clostridium spp., enterotoxigenic Eschericia coli, Bacillus anthracis, Rickettsia, Bartonella henselae, Bartonella quintana, Coxiella burnetii, chlamydia, Mycobacterium leprae, Salmonella; shigella; Yersinia enterocolitica; Yersinia pseudotuberculosis; Legionella pneumophila; Mycobacterium tuberculosis; Listeria monocytogenes; Mycoplasma spp.; Pseudomonas fluorescens; Vibrio cholerae; Haemophilus influenzae; Bacillus anthracis; Treponema pallidum; Leptospira; Borrelia; Corynebacterium diphtheriae; Francisella; Brucella melitensis; Campylobacter jejuni; Enterobacter; Proteus mirabilis; Proteus; and Klebsiella pneumoniae.

[0616] Exemplary bacterial pathogens are shown below in Table 24.

TABLE 24
Bacterial Pathogens

| Phylum | By Genus | Species/Pathology Example |
|---|---|---|
| Proteobacteria | Erlichia | Erlichosis (Pain, malaise, fever gastrointestinal disorder, |
| | | confusion rash. Can be fatal) |
| Proteobacteria | Rickettsia | Two groups of diseases from different subspecies - |
| | | Spotted fever; Typhus |
| Proteobacteria | Brucella | Brucellosis. 4 known species cause disease in humans. |
| | | Can be sporadic or chronic. Fever, malaise, lesions |
| Proteobacteria | Bartonella | Multiple species. Pathophysiology includes endocarditis, |
| | | neuroretinitis, cat scratch disease, peliosis hepititus, |
| | | general bactermia angiomatosis, Carrion's disease, |
| | | Trench fever |
| Proteobacteria | Bordetella | Multiple species. Adherence to ciliated ephilium drives |
| | | respiratory tract infections. B. pertussis = subspecies |
| | | example |
| Proteobacteria | Neisseria | Includes N meningitidis (bacterial meningitis and |
| | | septicemia) and N gonorrheae (Gonorrhea) - colonize |
| | | mucosal surfaces |
| Proteobacteria | Francisella | Examples include f. tularensis (tularemia), F novicida, |
| | | F philomiragia (septicemia) |
| Proteobacteria | Legionella | Examples include L pneumophila - legionnaires disease |
| | | and pontiac fever |
| Proteobacteria | Coxiella | Coxiella burnetii - Q Fever |
| Proteobacteria | Moraxella | Examples include M. catarrhalis (lower respiratory tract |
| | | infection) and Moraxella lacunata |
| | | (blepharoconjunctivitis) |
| Proteobacteria | Pseudomonas | Multiple groups and subspecies therein. Examples |
| | | include P. aeruginosa - opportunistic infection in cystic |
| | | fobrosis, burn and immunocompromised subjects. |
| | | Colonizes skin, lungs, kidney, urinary tract. Found on |
| | | most medical equipment - develops enduring biofilms |
| Proteobacteria | Vibrio | Multiple species - foodborne disease generally |
| | | implicated with gastroenteritis - example - V. cholerae. |
| | | Can also cause septicemia in open wounds |
| Proteobacteria | Plesimonas | Example P. Shigelloides - causes gastrointestinal disease |
| Proteobacteria | Aeromonas | Cornucopia of human disease including and not limited to |
| | | gastrointestinal disease, wound and soft tissue infection, |
| | | blood borne dyscrasias |
| Proteobacteria | Citrobacter | Examples: C. freundii, C. koseri, C. amalonaticus. Infect |
| | | urinary tract, can cause infant meningitis and sepsis |
| Proteobacteria | Enterobacter | Multiple species - Urinary and respiratory tract |
| | | infections are most common. Example E. aerogenes are a |
| | | common source of opportunistic and/or nosocomial |
| | | infections |
| Proteobacteria | Escerichia | Common cause of gastrointestinal infections. Example |
| | | E. coli |
| Proteobacteria | Klebsiella | Multiple species and sub-species. Cause a variety of |
| | | opporuntistic infections: Pneumonia, UTI, septicemia, |
| | | meningitis, diarrhea, soft tissue infection |
| Proteobacteria | Proteus | Urinary tract infections (including kidney) - P. vulgaris, |
| | | P. mirabilis, P. penneri |
| Proteobacteria | Providencia | Multiple species cause. Urinary tract infections. |
| | | Example: P. stuartii |
| Proteobacteria | Morganella | Single species with 2 subspecies. M. morganii. Cause |
| | | opportunistic infections (wound, UTI) |
| Proteobacteria | Salmonella | Two species S. bongori and S. enterica, along with |
| | | multiple subspecies. Typical non-typhoidal salmonella |
| | | causes gastrointestinal disease. In developing countries it |
| | | also causes blood infections. Typhiidal disease causes |
| | | typhoid fever, hypovolemic shock, septic shock |
| Proteobacteria | Serratia | Multiple species: Opportunisitc infection that often |
| | | develops biofilms. Colonizes respiratory and urinary |
| | | tract. Responsible for 2% of nosocomial infections of |
| | | blood, LRT, UT, surgical wounds, skin and soft tissue |
| | | infection. Example s. marcescens |
| Proteobacteria | Shigella | 4 species. Causes shigellosis (leading bacterial cause of |
| | | diarrhea). Example : S. dysenteriae |
| Proteobacteria | Yersinia | Multiple species and sub-species. Example: Y. pestis |
| | | causes the plague |
| Proteobacteria | Pasteurella | Multiple species. P. multocida species is the most |
| | | frequent example of human infection ( - symptoms |
| | | include swelling, cellulitis, wound drainage and arthritis) |
| Proteobacteria | Hemophilus | Multiple species. Example H influenzae (Hib) causes |
| | | penumonia, sepsis and bacterial meningitis in young |
| | | children |
| Proteobacteria | Campylobacter | Multiple species. Cause campylobacteriosis |
| | | (gastrointestinal disease - inflammatory diarrhea/ |
| | | dysentery). Example C. rectus |
| Proteobacteria | Heliobacter | Example H pylori. Causes gastritis and gastric ulcers |
| Firmicutes | Clostridia | Multiple Species. Examples: C. Difficile, C. botulinum, |
| | | C. tetani. Cause a variety of serious conditions, from |
| | | colitis to paralysis |
| Firmicutes | Mycoplasmas | Multiple species. Examples: M. genitalium, |
| | | M pneumoniae. Ureaplasma species. Associated with |
| | | sexually transmited disease, infertility and infant |
| | | respiratory distress and brain hemorrhage. P1 antigen is |
| | | primary virulence factor, which is also expressed on |
| | | erthyrocytes. This can lead to autoantibody agglutination |
| Firmicutes | Bacillus | One of the most diverse genus from a speciation |
| | | perspective. Examples B. anthracis (anthrax), B. cereus |
| | | (food poisoning) |
| Firmicutes | Listeria | 15 identified species. Example: L. monocytogenes food |
| | | poisining. Less frequently seen disease manifestation = |
| | | listeriosis (sepsis and meningitis with a 20% fatality rate) |
| Firmicutes | Staphylococcus | Multiple species and sub. Example: S. aureus. Disease |
| | | can range from folliculitis to necrotizing pneumonia and |
| | | endocarditis. Commonly drug resistant (MRSA) |
| Firmicutes | Enterococcus | Multiple species. Cause UTI, Bacteremia, endocarditis, |
| | | diverticulitis, meningitis, prostatitis. Example: |
| | | E. faecium. Increasingly drug resistant (VRE) |
| Firmicutes | Lactobacillus | Often considered beneficial, but can cause septicemia, |
| | | endocarditis, rheumatic vascular disease and dental |
| | | caries(particularly in immuno-compromised subjects). |
| | | Example L. rhamnosus |
| Firmicutes | Streptococcus | Multiple species. Cause strep throat, pink eye, |
| | | meningitis, bacterial pneumonia, sepsis, endocarditis, |
| | | erysipelas, necrotizing fasciitis. Examples: S. pyogenes, |
| | | S. pneumoniae, S. sanguinis |
| Actinobacteria | Nocardia | Multiple species. Low virulence and generally infect the |
| | | immunocompromised only. Cause penumonia, |
| | | endocarditis, encephalitis, cellulitis. Example |
| | | N. asteroids |
| Actinobacteria | Mycobacterium | Multiple species. Cause tuberculosis, leprosy. Examples |
| | | M. tuberculosis, M. leprae |
| Actinobacteria | Corynebacterium | Multiple species. Cause diphtheria, colonizes prosthetics, |
| | | and can cause skin infections, endocarditis, pneumonitis. |
| | | Nosocomial |
| Actinobacteria | Actinomyces | Multiple species. Cause periodontal abscesses, |
| | | lymphadenopathy, thoracic disease and abdominal |
| | | abscess. Example: Aggregatibacter |
| | | actinomycetemcomitans |
| Chlamydia | Chlamydia | 4 species. Most common bacterial STD and can cause |
| | | blindness. Example Chlamydia trachomatis. |
| Spirochetes | Borrelia | 52 species. Cause Lyme disease and relapsing fever |
| | | (severe bacteremia). Example: Borrelia burgdorferi |
| Spirochetes | Leptospira | Multiple species (13 cause disease in humans). Cause |
| | | leptospirosis - symptoms range from headaches and |
| | | fatigue to meningitis, kidney failure and pulmonary |
| | | hemorrhage. |
| Spirochetes | Treponema | Multiple species. Causes syphilis Example: Treponema |
| | | pallidum. |
| Bacteroides | Bacteroides | Multiple species. Colonize the gut and cause infections |
| | | associated with surgery, appendicitis etc. Example: |
| | | B. fragilis |

[0617] In certain embodiments, the infectious disease therapeutic is selected from a fungal polypeptide. In these embodiments, an engineered erythroid cell or enucleated cell comprises an erythroid cell (e.g., an enucleated erythroid cell) or an enucleated cell, comprising one or more exogenous antigenic polypeptides, wherein one of the one or more exogenous antigenic polypeptides comprises an antigenic fungal polypeptide, and the engineered erythroid cell or enucleated cell is administered to a subject to treat an infection with the fungus.

[0618] Exemplary fungal pathogens are shown below in Table 25.

TABLE 25
Fungal Pathogens

| Fungal | | |
|---|---|---|
| Group | Pathogen Species | Pathology example |
| Yeast | Candida albicans | Oral thrush, onychomycosis |
| Yeast | Candida glabrata | Vaginitis, esophageal candidiasis |
| Yeast | Candida krusei | Invasive candidiasis, neutropenia |
| Yeast | Candida | Catheter and central line infections, biofilms, UTI, |
| | parapsilosis | endocarditis, meningitis |
| Yeast | Candida tropicalis | Candidemia, oral thrush |
| Yeast | Rhodotorula | Sepsis, catheter infections, fungemia, meningitis, peritonitis |
| | mucilaginosa | |
| Yeast | Sporothrix | Sporotrichosis (lympocutaneous tissue, skin ulcerations) |
| | schenckii complex | |
| Yeast | Cryptococcus | Cryptococcal meningitis, pulmonary infection, osteomyelitis |
| | neoformans | |
| Yeast | Cryptococcus | Cryptococcal meningitis, pulmonary infection, osteomyelitis |
| | gattii | (more common in immunocompromised subjects that |
| | | C. neoformans, which is more prevalent in immunocompetent |
| | | subjects) |
| Moulds | Alternaria | Allergic fungal rhinosinusitis, Keratitis, peritonitis, allergic |
| | alternata | respiratory disease |
| Moulds | Apophysomyces | Cutaneous and subcutaneous infection |
| | variabilis | |
| Moulds | Aspergillus | Chronic pulmonary aspergillosis, Asthma exacerbation with |
| | fumigatus | fungal sensitization, chronic invasive sinusitis, invasive and |
| | | disseminated aspergillosis |
| Moulds | Aspergillus flavus | Chronic cavity pulmonary aspergillosis, Cutaneous and |
| | | wound infection, endocarditis, pericarditis and CNS |
| | | infection, UTI |
| Moulds | Aspergillus niger | Otomycosis, SAFS, Allergic bronchopulmonary |
| | | aspergillosis, invasive pulmonary aspergillosis, disseminated |
| | | aspergillosis |
| Moulds | Aspergillus terreus | ABPA, aspergillus bronchitis, invasive aspergillosis, |
| | | disseminated aspergillosis |
| Moulds | Cladosphialophora | Chromoblastomycosis, mycetoma, phaehyphomycosis |
| | spp. | |
| Moulds | Exserohilum | Skin, corneal infection, invasive infection of sinus heart and |
| | | lung |
| Moulds | Fonsecaea | Chromoblastomycosis |
| | pedrosoi | |
| Moulds | Fusarium | Keratitis, Onychomycosis, endophthalmitis, skin infection, |
| | oxysporum | sinusitis, disseminated infection |
| Moulds | Fusarium solani | Keratitis, Onychomycosis, endophthalmitis, skin infection, |
| | | sinusitis, disseminated infection |
| Moulds | Lichtheimia | cutaneous, pulmonary, rhinocerebral CNS and disseminated |
| | corymbifera | infection (rare) |
| Moulds | Lichtheimia | cutaneous, pulmonary, rhinocerebral CNS and disseminated |
| | ramosa | infection (rare) |
| Moulds | Rhizopus | Mucormycosis |
| | microsporus | |
| Moulds | Stachybotrys | idiopathic pulmonary hemorrhage (infants) |
| Moulds | Trichophyton | Tinea pedis, corporis, cruris, onychomycosis and |
| | interdigitale | occasionally Tinea capitis |
| Moulds | Trichophyton | Tinea of the groin, glabrous skin, feet, hands, and the nails. |
| | rubrum | Tinea cruris, tinea corporis, tinea pedis, tinea manuum, and |
| | | onychomycosis |
| Dimorphic | Histoplasma | Pneumonia, multi-organ failure |
| Fungi | capsulatum | |
| Dimorphic | Pneumocystis | Pneumonia (mostly in immune suppressed subjects) |
| Fungi | jirovecii | |
| Dimorphic | Paracoccidioides | Disseminated systemic infection |
| Fungi | brasiliensis | |
| Dimorphic | Penicillium | Disseminated infection with prominent skin lesions |
| Fungi | marneffei | (immunocompromised subjects) |
| Dimorphic | Blastomyces | Skin infections, rarely disseminated |
| Fungi | | |
| Dimorphic | Coccidioides | Meningitis, disseminated disease, lung nodule, chronic |
| Fungi | | cavitary pulmonary coccidioidmycosis |

[0619] In certain embodiments, the infectious disease therapeutic is selected from a parasitic polypeptide. In these embodiments, an engineered erythroid cell or enucleated cell comprises an erythroid cell (e.g., an enucleated erythroid cell) or an enucleated cell, comprising one or more exogenous antigenic polypeptides, wherein one of the one or more exogenous antigenic polypeptides comprises an antigenic parasitic polypeptide, and the engineered erythroid cell or enucleated cell is administered to a subject to treat an infection with the parasite.

[0620] Exemplary parasitic pathogens are shown below in Table 26.

TABLE 26
Parasitic Pathogens

| Parasitic | | |
|---|---|---|
| Group | Pathogen Species | Disease/Pathology Example |
| Amoeba/ | Acanthamoeba | Acanthamoeba Infection |
| Protozoa | | |
| Amoeba/ | Acanthamoeba | Acanthamoeba Keratitis Infection |
| Protozoa | | |
| Amoeba/ | Trypanosoma brucei | African Sleeping Sickness (African trypanosomiasis) |
| Protozoa | | |
| Amoeba/ | Entamoeba histolytica | Amebiasis (Entamoeba histolytica Infection) |
| Protozoa | | |
| Amoeba/ | Trypanosoma cruzi | American Trypanosomiasis (Chagas Disease) |
| Protozoa | | |
| Amoeba/ | Balantidium coli | Balantidiasis (Balantidium Infection) |
| Protozoa | | |
| Amoeba/ | Balamuthia mandrillaris | Balamuthia (Granulomatous Amebic Encephalitis (GAE)) |
| Protozoa | | |
| Amoeba/ | Cryptosporidium | Cryptosporidiosis (Cryptosporidium Infection) |
| Protozoa | | |
| Amoeba/ | Cyclospora | Cyclosporiasis (Cyclospora Infection) |
| Protozoa | | |
| Amoeba/ | Taenia solium | Cysticercosis (Neurocysticercosis) |
| Protozoa | | |
| Amoeba/ | Cystoisospora belli | Cystoisospora Infection (Cystoisosporiasis) formerly |
| Protozoa | | Isospora Infection |
| Amoeba/ | Dientamoeba fragilis | Dientamoeba fragilis Infection |
| Protozoa | | |
| Amoeba/ | Entamoeba histolytica | Entamoeba histolytica Infection (Amebiasis) |
| Protozoa | | |
| Amoeba/ | Giardia intestinalis, | Giardiasis (Giardia Infection) |
| Protozoa | Giardia lamblia, or | |
| | Giardia duodenalis | |
| Amoeba/ | Leishmania | Kala-azar (Leishmaniasis, Leishmania Infection) |
| Protozoa | | |
| Amoeba/ | Acanthamoeba | Keratitis (Acanthamoeba Infection) |
| Protozoa | | |
| Amoeba/ | Multiple species. | Malaria (Plasmodium Infection) |
| Protozoa | Examples: P. vivax and | |
| | P. ovale | |
| Amoeba/ | Naegleria fowleri | Naegleria Infection |
| Protozoa | “brain-eating amoeba” | |
| Amoeba/ | Sappinia ameoba | Sappinia (amebic encephalitis) |
| Protozoa | | |
| Amoeba/ | Sarcocystis | Sarcocystosis (Sarcocystosis Infection) |
| Protozoa | | |
| Amoeba/ | Toxoplasma gondii | Toxoplasmosis (Toxoplasma Infection) - protozoa |
| Protozoa | | |
| Amoeba/ | Trichomonas vaginalis | Trichomoniasis (Trichomonas Infection) - protozoa |
| Protozoa | | |
| Amoeba/ | Trypanosoma brucei | Trypanosomiasis, African (African Sleeping Sickness, |
| Protozoa | | Sleeping Sickness) - protozoa |
| Amoeba/ | Babesia (various | Babesiosis (Babesia Infection) - similar lifecycle to |
| Protozoa | species) | malaria, taken up by RBCs |
| Arthropod | Cimex lectulariusand | Bed Bugs |
| | C. hemipterus | |
| Arthropod | Pediculus humanus | Body Lice Infestation (Pediculosis) |
| | humanus | |
| Arthropod | Phthirus pubis | Crabs (Pubic Lice) |
| Arthropod | Pediculus humanus | Head Lice Infestation (Pediculosis) |
| | capitis | |
| Arthropod | Sarcoptes | Mite Infestation (Scabies) |
| | scabiei var. hominis | |
| Arthropod | infection of a fly larva. | Myiasis |
| | Examples: Dermatobia | |
| | hominis | |
| Other | group of obligate | Microsporidiosis (Microsporidia Infection) |
| | intracellular parasitic | |
| | fungi. Examples: M. | |
| | africanum, Nosema | |
| | ocularum | |
| Other | Pneumocystis jirovecii | Pneumocystis jirovecii Pneumonia |
| | (considered a parasitic | |
| | fungi) | |
| Protist | Blastocystis hominis | Blastocystis hominis Infection |
| Worm | Echinococcus | Alveolar Echinococcosis (Echinococcosis, Hydatid |
| | granulosus | Disease) |
| Worm | Hookworm (various | Ancylostomiasis (Hookworm) |
| | species) | |
| Worm | Angiostrongylus | Angiostrongyliasis (Angiostrongylus Infection) |
| | (various species) | |
| | nematode | |
| Worm | anisakid nematodes | Anisakiasis (Anisakis Infection, Pseudoterranova |
| | | Infection) |
| Worm | Ascaris lumbricoides | Ascariasis (Ascaris Infection, Intestinal Roundworms) |
| Worm | Baylisascaris procyonis | Baylisascariasis (Baylisascaris Infection, Raccoon |
| | | Roundworm) |
| Worm | Schistosoma mansoni | Bilharzia (Schistosomiasis) |
| Worm | Capillaria | Capillariasis (Capillaria Infection) |
| | hepatica and Capillaria | |
| | philippinensis | |
| Worm | Various species, | Cercarial Dermatitis (Swimmer's Itch) |
| | example: | |
| | Austrobilharzia | |
| | variglandis | |
| Worm | Clonorchis liver fluke | Clonorchiasis (Clonorchis Infection) |
| Worm | Diphyllobothrium | Diphyllobothriasis (Diphyllobothrium Infection) |
| | latum (tapeworm) | |
| Worm | Dipylidiu tapeworm | Dipylidium caninum Infection (dog or cat tapeworm |
| | | infection) |
| Worm | Dirofilaria roundworms | Dirofilariasis (Dirofilaria Infection) |
| Worm | Guinea worm | Dracunculiasis (Guinea Worm Disease) |
| Worm | Echinococcus | Echinococcosis (Cystic, Alveolar Hydatid Disease) |
| | granulosus & | |
| | Echinococcus | |
| | multilocularis | |
| Worm | Wuchereria | Elephantiasis (Filariasis, Lymphatic Filariasis) |
| | bancrofti, Brugia malayi | |
| | and Brugia timori | |
| Worm | Enterobius vermicularis | Enterobiasis (Pinworm Infection) |
| Worm | Fasciola hepatica | Fascioliasis (Fasciola(liver fluke) Infection) |
| Worm | Fasciolopsis buski | Fasciolopsiasis (Fasciolopsis Infection) |
| Worm | Gnathostoma: several | Gnathostomiasis (Gnathostoma Infection) |
| | species of parasitic | |
| | nematodes | |
| Worm | trematode Heterophyes | Heterophyiasis (Heterophyes Infection) |
| | heterophyes | |
| Worm | Multiple species. | Hookworm Infection, Human |
| | Example: Ancylostoma | |
| | duodenale and Necator | |
| | americanus | |
| Worm | Multiple species. | Hookworm Infection, Zoonotic (Ancylostomiasis, |
| | Example: Ancylostoma | Cutaneous Larva Migrans [CLM]) |
| | brazilense, A. caninum, | |
| | A. ceylanicum | |
| Worm | Hymenolepis nana | Hymenolepiasis (Hymenolepis Infection) |
| | (dwarf tapeworm) | |
| Worm | Various species, | Intestinal Roundworms (Ascariasis, Ascaris Infection) |
| | example: A. | |
| | lumbricoides | |
| Worm | Loa: parasitic worm | Loiasis (Loa loa Infection) |
| Worm | Taenia solium | Neurocysticercosis (Cysticercosis) |
| Worm | Toxocara canis and | Ocular Larva Migrans (Toxocariasis, Toxocara Infection, |
| | Toxocara cati | Visceral Larva Migrans) |
| Worm | Onchocerca volvulus | Onchocerciasis (River Blindness) |
| Worm | Opisthorchis (liver | Opisthorchiasis (Opisthorchis Infection) |
| | fluke). Example: O | |
| | Opisthorchis felineus | |
| Worm | Paragonimus (lung | Paragonimiasis (Paragonimus Infection) |
| | fluke) | |
| Worm | anisakid nematodes | Pseudoterranova Infection (Anisakiasis, Anisakis |
| | | Infection) |
| Worm | Strongyloides | Strongyloidiasis (Strongyloides Infection) |
| | nematodes. Example: | |
| | Strongyloides | |
| | stercoralis | |
| Worm | Taenia saginata | Taeniasis (Taenia Infection, Tapeworm Infection) |
| Worm | Trichinella | Trichinellosis (Trichinosis) |
| Worm | Trichuris trichiura | Trichuriasis (Whipworm Infection, Trichuris Infection) |

[0621] In some embodiments, the infectious disease is a multi-drug resistant Staphylococcus infection (e.g., a Staphylococcus aureus infection. In another embodiments, the infectious diseases is Pseudomonas infection. In another embodiment, the infectious disease is a nosocomial infections (i.e. any systemic or localized conditions that result from the reaction by an infectious agent or toxin) that are difficult to treat, for example infections caused by Clostridium difficile.

[0622] Other

[0623] Other diseases and disorders are contemplated for treatment by the engineered erythroid cells or enucleated cells of the present disclosure. Examples include, but are not limited to cardiovascular diseases and immune diseases.

### Subjects

[0624] The methods described herein are intended for use with any subject that may experience the benefits of these methods. Thus, “subjects,” “subjects,” and “individuals” (used interchangeably) include humans as well as non-human subjects, particularly domesticated animals.

[0625] In some embodiments, the subject and/or animal is a mammal, e g., a human, mouse, rat, guinea pig, dog, cat, horse, cow, pig, rabbit, sheep, or non-human primate, such as a monkey, chimpanzee, or baboon. In other embodiments, the subject and/or animal is a non-mammal. In some embodiments, the subject and/or animal is a human. In some embodiments, the human is a pediatric human In other embodiments, the human is an adult human. In other embodiments, the human is a geriatric human. In other embodiments, the human may be referred to as a subject.

[0626] In certain embodiments, the human has an age in a range of from about 0 months to about 6 months old, from about 6 to about 12 months old, from about 6 to about 18 months old, from about 18 to about 36 months old, from about 1 to about 5 years old, from about 5 to about 10 years old, from about 10 to about 15 years old, from about 15 to about 20 years old, from about 20 to about 25 years old, from about 25 to about 30 years old, from about 30 to about 35 years old, from about 35 to about 40 years old, from about 40 to about 45 years old, from about 45 to about 50 years old, from about 50 to about 55 years old, from about 55 to about 60 years old, from about 60 to about 65 years old, from about 65 to about 70 years old, from about 70 to about 75 years old, from about 75 to about 80 years old, from about 80 to about 85 years old, from about 85 to about 90 years old, from about 90 to about 95 years old or from about 95 to about 100 years old.

[0627] In other embodiments, the subject is a non-human animal, and therefore the disclosure pertains to veterinary use. In a specific embodiment, the non-human animal is a household pet. In another specific embodiment, the non-human animal is a livestock animal In certain embodiments, the subject is a human cancer subject that cannot receive chemotherapy, e.g. the subject is unresponsive to chemotherapy or too ill to have a suitable therapeutic window for chemotherapy (e.g. experiencing too many dose- or regimen-limiting side effects). In certain embodiments, the subject is a human cancer subject having advanced and/or metastatic disease.

[0628] In some embodiments, the subject is selected for treatment with an engineered erythroid cell or enucleated cell comprising one or more exogenous polypeptides of the present disclosure. In some embodiments, the subject is selected for treatment of cancer with an engineered erythroid cell or enucleated cell comprising one or more exogenous polypeptides of the present disclosure. In some embodiments, the subject is selected for treatment of an autoimmune disease with an engineered erythroid cell or enucleated cell comprising one or more exogenous polypeptides of the present disclosure. In some embodiments, the subject is selected for treatment of an infectious disease with an engineered erythroid cell or enucleated cell comprising one or more exogenous polypeptides of the present disclosure.

[0629] In some embodiments of the above aspects and embodiments, the engineered erythroid cell is an enucleated erythroid cell. In some embodiments of the above aspects and embodiments, the engineered erythroid cell is a nucleated erythroid cell.

### IV. Pharmaceutical Compositions

[0630] The present disclosure encompasses the preparation and use of pharmaceutical compositions comprising an engineered erythroid cell or enucleated cell of the disclosure as an active ingredient. Such a pharmaceutical composition may consist of the active ingredient alone, as a combination of at least one active ingredient (e.g., an effective dose of an engineered erythroid cell or enucleated cell) in a form suitable for administration to a subject, or the pharmaceutical composition may comprise the active ingredient and one or more pharmaceutically acceptable carriers, one or more additional (active and/or inactive) ingredients, or some combination of these.

[0631] In some embodiments, the disclosure features a pharmaceutical composition comprising a plurality of the engineered erythroid cells or enucleated cells described herein, and a pharmaceutical carrier. In other embodiments, the disclosure features a pharmaceutical composition comprising a population of engineered erythroid cells or enucleated cells as described herein, and a pharmaceutical carrier. It will be understood that any single engineered erythroid cells or enucleated cells , plurality of engineered erythroid cells or enucleated cells , or population of engineered erythroid cells or enucleated cells as described elsewhere herein may be present in a pharmaceutical composition of the disclosure.

[0632] In some embodiments, the pharmaceutical compositions provided herein comprise engineered (i.e. modified) erythroid cells and unmodified erythroid cells. For example, a single unit dose of engineered erythroid cells or enucleated cells can comprise, in various embodiments, about, at least, or no more than 10%, 20%, 30%, 40%, 50%, 60%, 70%, 75%, 80%), 85%, 90%, 95%, or 99% engineered erythroid cells, wherein the remaining erythroid cells in the composition are not engineered.

[0633] In some embodiments, the pharmaceutical compositions provided herein comprise engineered erythroid cells or enucleated cells comprising engineered erythroid cells or enucleated cells and nucleated erythroid cells. For example, a single unit dose of engineered erythroid cells (e.g., enucleated and nucleated erythroid cells) can comprise, in various embodiments, about, or at least 10%, 20%, 30%, 40%, 50%, 60%, 70%, 75%, 80%, 85%, 90%, 91%, 92%, 93%, 94%, 95%, 96%, 97%, 98%, or 99% enucleated erythroid cells, wherein the remaining erythroid cells in the composition are nucleated.

[0634] Pharmaceutical compositions of the present disclosure may be administered in a manner appropriate to the disease to be treated (or prevented). The quantity and frequency of administration will be determined by such factors as the condition of the subject, and the type and severity of the subject's disease, although appropriate dosages may be determined by clinical trials.

[0635] The administration of the pharmaceutical compositions may be carried out in any convenient manner, including by aerosol inhalation, injection, ingestion, transfusion, implantation or transplantation. The compositions of the present disclosure may be administered to a subject subcutaneously, intradermally, intramuscularly, by intravenous (i.v.) injection, or intraperitoneally. The pharmaceutical compositions may be injected directly into a tumor or lymph node.

[0636] As used herein, the term “pharmaceutically acceptable carrier” means a chemical composition with which the active ingredient may be combined and which, following the combination, can be used to administer the active ingredient to a subject.

[0637] The formulations of the pharmaceutical compositions described herein may be prepared by any method known or hereafter developed in the art of pharmacology. In general, such preparatory methods include the step of bringing the active ingredient into association with a carrier or one or more other accessory ingredients, and then, if necessary or desirable, shaping or packaging the product into a desired single- or multi-dose unit.

[0638] Although the descriptions of pharmaceutical compositions provided herein are principally directed to pharmaceutical compositions which are suitable for ethical administration to humans, it will be understood by the skilled artisan that such compositions are generally suitable for administration to animals of all sorts. Modification of pharmaceutical compositions suitable for administration to humans in order to render the compositions suitable for administration to various animals is well understood, and the ordinarily skilled veterinary pharmacologist can design and perform such modification with merely ordinary, if any, experimentation. Subjects to which administration of the pharmaceutical compositions of the disclosure is contemplated include, but are not limited to, humans and other primates, mammals including commercially relevant mammals such as non-human primates, cattle, pigs, horses, sheep, cats, and dogs, birds including commercially relevant birds such as chickens, ducks, geese, and turkeys, fish including farm-raised fish and aquarium fish, and crustaceans such as farm-raised shellfish.

[0639] Pharmaceutical compositions that are useful in the methods of the disclosure may be prepared, packaged, or sold in formulations suitable for oral, rectal, vaginal, parenteral, topical, pulmonary, intranasal, intra-lesional, buccal, ophthalmic, intravenous, intra-organ or another route of administration. Other contemplated formulations include projected nanoparticles, liposomal preparations, resealed erythrocytes containing an exogenous polypeptide described herein, and immunologically-based formulations.

[0640] A pharmaceutical composition of the disclosure may be prepared, packaged, or sold in bulk, as a single unit dose, or as a plurality of single unit doses. As used herein, a “unit dose” is discrete amount of the pharmaceutical composition comprising a predetermined amount of the active ingredient. The amount of the active ingredient is generally equal to the dosage of the active ingredient which would be administered to a subject or a convenient fraction of such a dosage such as, for example, one-half or one-third of such a dosage.

[0641] The relative amounts of the active ingredient, the pharmaceutically acceptable carrier, and any additional ingredients in a pharmaceutical composition of the disclosure will vary, depending upon the identity, size, and condition of the subject treated and further depending upon the route by which the composition is to be administered. By way of example, the composition may comprise between 0.1% and 100% (w/w) active ingredient.

[0642] In addition to the active ingredient, a pharmaceutical composition of the disclosure may further comprise one or more additional pharmaceutically active agents. Particularly contemplated additional agents include anti-emetics and scavengers such as cyanide and cyanate scavengers and AZT, protease inhibitors, reverse transcriptase inhibitors, interleukin-2, interferons, cytokines, and the like.

[0643] Controlled- or sustained-release formulations of a pharmaceutical composition of the disclosure may be made using conventional technology.

[0644] As used herein, “parenteral administration” of a pharmaceutical composition includes any route of administration characterized by physical breaching of a tissue of a subject and administration of the pharmaceutical composition through the breach in the tissue. Parenteral administration thus includes, but is not limited to, administration of a pharmaceutical composition by injection of the composition, by application of the composition through a surgical incision, by application of the composition through a tissue-penetrating non-surgical wound, and the like. In particular, parenteral administration is contemplated to include, but is not limited to, subcutaneous, intraperitoneal, intramuscular, intrasternal injection, and kidney dialytic infusion techniques.

[0645] Formulations of a pharmaceutical composition suitable for parenteral administration comprise the active ingredient combined with a pharmaceutically acceptable carrier, such as sterile water or sterile isotonic saline. Such formulations may be prepared, packaged, or sold in a form suitable for bolus administration or for continuous administration. Injectable formulations may be prepared, packaged, or sold in unit dosage form, such as in ampules or in multi-dose containers containing a preservative. Formulations for parenteral administration include, but are not limited to, suspensions, solutions, emulsions in oily or aqueous vehicles, pastes, and implantable sustained-release or biodegradable formulations. Such formulations may further comprise one or more additional ingredients including, but not limited to, suspending, stabilizing, or dispersing agents.

[0646] The pharmaceutical compositions may be prepared, packaged, or sold in the form of a sterile injectable aqueous or oily suspension or solution. This suspension or solution may be formulated according to the known art, and may comprise, in addition to the active ingredient, additional ingredients such as the dispersing agents, wetting agents, or suspending agents described herein. Such sterile injectable formulations may be prepared using a non-toxic parenterally-acceptable diluent or solvent, such as water or 1,3-butane diol, for example. Other acceptable diluents and solvents include, but are not limited to, Ringer's solution, isotonic sodium chloride solution, and fixed oils such as synthetic mono- or di-glycerides. Other parentally-administrable formulations which are useful include those which comprise the active ingredient in microcrystalline form, in a liposomal preparation, or as a component of a biodegradable polymer systems. Compositions for sustained release or implantation may comprise pharmaceutically acceptable polymeric or hydrophobic materials such as an emulsion, an ion exchange resin, a sparingly soluble polymer, or a sparingly soluble salt.

[0647] The engineered erythroid cell or enucleated cell of the disclosure and/or T cells expanded using the engineered erythroid cell or enucleated cell, can be administered to an animal, preferably a human. When the T cells expanded using an engineered erythroid cell or enucleated cell of the disclosure are administered, the amount of cells administered can range from about 1 million cells to about 300 billion. Where the engineered erythroid cells or enucleated cells themselves are administered, either with or without T cells expanded thereby, they can be administered in an amount ranging from about 100,000 to about one billion cells wherein the cells are infused into the animal, preferably, a human subject in need thereof. While the precise dosage administered will vary depending upon any number of factors, including but not limited to, the type of animal and type of disease state being treated, the age of the animal and the route of administration.

[0648] The engineered erythroid cell or enucleated cell may be administered to an animal as frequently as several times daily, or it may be administered less frequently, such as once a day, once a week, once every two weeks, once a month, or even less frequently, such as once every several months or even once a year or less. The frequency of the dose will be readily apparent to the skilled artisan and will depend upon any number of factors, such as, but not limited to, the type and severity of the disease being treated, the type and age of the animal, etc.

[0649] An engineered erythroid cell or enucleated cell (or cells expanded thereby) may be co-administered with the various other compounds (cytokines, chemotherapeutic and/or antiviral drugs, among many others). Alternatively, the compound(s) may be administered an hour, a day, a week, a month, or even more, in advance of the engineered erythroid cell or enucleated cell (or cells expanded thereby), or any permutation thereof. Further, the compound(s) may be administered an hour, a day, a week, or even more, after administration of engineered erythroid cell or enucleated cell (or cells expanded thereby), or any permutation thereof. The frequency and administration regimen will be readily apparent to the skilled artisan and will depend upon any number of factors such as, but not limited to, the type and severity of the disease being treated, the age and health status of the animal, the identity of the compound or compounds being administered, the route of administration of the various compounds and the engineered erythroid cell or enucleated cell (or cells expanded thereby), and the like.

[0650] Further, it would be appreciated by one skilled in the art, based upon the disclosure provided herein, that where the engineered erythroid cell or enucleated cell is to be administered to a mammal, the cells are treated so that they are in a “state of no growth”; that is, the cells are incapable of dividing when administered to a mammal. As disclosed elsewhere herein, the cells can be irradiated to render them incapable of growth or division once administered into a mammal. Other methods, including haptenization (e.g., using dinitrophenyl and other compounds), are known in the art for rendering cells to be administered, especially to a human, incapable of growth, and these methods are not discussed further herein. Moreover, the safety of administration of engineered erythroid cell or enucleated cell that have been rendered incapable of dividing in vivo has been established in Phase I clinical trials using engineered erythroid cell or enucleated cell transfected with plasmid vectors encoding some of the molecules discussed herein.

### Combination Therapies

[0651] In some embodiments, the disclosure provides methods that further comprise administering an additional agent to a subject. In some embodiments, the disclosure pertains to co-administration and/or co-formulation.

[0652] In some embodiments, administration of the engineered erythroid cell or enucleated cell acts synergistically when co-administered with another agent and is administered at doses that are lower than the doses commonly employed when such agents are used as monotherapy.

[0653] In some embodiments, inclusive of, without limitation, cancer applications, the present disclosure pertains to chemotherapeutic agents as additional agents. Examples of chemotherapeutic agents include, but are not limited to, alkylating agents such as thiotepa and CYTOXAN cyclosphosphamide; alkyl sulfonates such as busulfan, improsulfan and piposulfan; aziridines such as benzodopa, carboquone, meturedopa, and uredopa; ethylenimines and methylamelamines including altretamine, triethylenemelamine, trietylenephosphoramide, triethiylenethiophosphoramide and trimethylolomelamine; acetogenins (e.g., bullatacin and bullatacinone); a camptothecin (including the synthetic analogue topotecan); bryostatin; cally statin; CC-1065 (including its adozelesin, carzelesin and bizelesin synthetic analogues); cryptophycins (e.g., cryptophycin 1 and cryptophycin 8); dolastatin; duocarmycin (including the synthetic analogues, KW-2189 and CB 1-TM1); eleutherobin; pancratistatin; a sarcodictyin; spongistatin; nitrogen mustards such as chlorambucil, chlornaphazine, cholophosphamide, estramustine, ifosfamide, mechlorethamine, mechlorethamine oxide hydrochloride, melphalan, novembichin, phenesterine, prednimustine, trofosfamide, uracil mustard; nitrosureas such as carmustine, chlorozotocin, fotemustine, lomustine, nimustine, and ranimnustine; antibiotics such as the enediyne antibiotics (e.g., calicheamicin, especially calicheamicin gammall and calicheamicin omegall; dynemicin, including dynemicin A; bisphosphonates, such as clodronate; an esperamicin; as well as neocarzinostatin chromophore and related chromoprotein enediyne antibiotic chromophores), aclacinomy sins, actinomycin, authramycin, azaserine, bleomycins, cactinomycin, carabicin, caminomycin, carzinophilin, chromomycinis, dactinomycin, daunorubicin, detorubicin, 6-diazo-5-oxo-L-norleucine, ADRIAMYCIN doxorubicin (including morpholino-doxorubicin, cyanomorpholino-doxorubicin, 2-pyrrolino-doxorubicin and deoxy doxorubicin), epirubicin, esorubicin, idarubicin, marcellomycin, mitomycins such as mitomycin C, mycophenolic acid, nogalamycin, olivomycins, peplomycin, potfiromycin, puromycin, quelamycin, rodorubicin, streptonigrin, streptozocin, tubercidin, ubenimex, zinostatin, zorubicin; anti-metabolites such as methotrexate and 5-fluorouracil (5-FU); folic acid analogues such as denopterin, methotrexate, pteropterin, trimetrexate; purine analogs such as fludarabine, 6-mercaptopurine, thiamiprine, thioguanine; pyrimidine analogs such as ancitabine, azacitidine, 6-azauridine, carmofur, cytarabine, dideoxyuridine, doxifluridine, enocitabine, floxuridine; androgens such as calusterone, dromostanolone propionate, epitiostanol, mepitiostane, testolactone; anti-adrenals such as minoglutethimide, mitotane, trilostane; folic acid replenisher such as frolinic acid; aceglatone; aldophosphamide glycoside; aminolevulinic acid; eniluracil; amsacrine; bestrabucil; bisantrene; edatraxate; demecolcine; diaziquone; elformithine; elliptinium acetate; an epothilone; etoglucid; gallium nitrate; hydroxyurea; lentinan; lonidainine; maytansinoids such as maytansine and ansamitocins; mitoguazone; mitoxantrone; mopidanmol; nitraerine; pentostatin; phenamet; pirarubicin; losoxantrone; podophyllinic acid; 2-ethylhydrazide; procarbazine; PSK polysaccharide complex; razoxane; rhizoxin; sizofuran; spirogermanium; tenuazonic acid; triaziquone; 2,2′,2″-trichlorotriethylamine; trichothecenes (e.g., T-2 toxin, verracurin A, roridin A and anguidine); urethan; vindesine; dacarbazine; mannomustine; mitobronitol; mitolactol; pipobroman; gacytosine; arabinoside (“Ara-C”); cyclophosphamide; thiotepa; taxoids, e.g., TAXOL paclitaxel (Bristol-Myers Squibb Oncology, Princeton, N.J.), ABRAXANE Cremophor-free, albumin-engineered nanoparticle formulation of paclitaxel, and TAXOTERE doxetaxel; chloranbucil; GEMZAR gemcitabine; 6-thioguanine; mercaptopurine; methotrexate; platinum analogs such as cisplatin, oxaliplatin and carboplatin; vinblastine; platinum; etoposide (VP-16); ifosfamide; mitoxantrone; vincristine; NAVELBINE. vinorelbine; novantrone; teniposide; edatrexate; daunomycin; aminopterin; xeloda; ibandronate; irinotecan (Camptosar, CPT-11) (including the treatment regimen of irinotecan with 5-FU and leucovorin); topoisomerase inhibitor RFS 2000; difluoromethylornithine (DMFO); retinoids such as retinoic acid; capecitabine; combretastatin; leucovorin (LV); oxaliplatin, including the oxaliplatin treatment regimen (FOLFOX); lapatinib (TYKERB); inhibitors of PKC-a., Raf, H-Ras, EGFR (e.g., erlotinib (Tarceva)) and VEGF-A that reduce cell proliferation and pharmaceutically acceptable salts, acids or derivatives of any of the above. In addition, the methods of treatment can further include the use of radiation.

[0654] Some human tumors can be eliminated by a subject's immune system. For example, administration of a monoclonal antibody targeted to an immune “checkpoint” molecule can lead to complete response and tumor remission. A mode of action of such antibodies is through inhibition of an immune regulatory molecule that the tumors have co-opted as protection from an anti-tumor immune response. By inhibiting these “checkpoint” molecules (e.g., with an antagonistic antibody), a subject's CD8+ T cells may be allowed to proliferate and destroy tumor cells.

[0655] For example, administration of a monoclonal antibody targeted to by way of example, without limitation, CTLA-4 or PD-1 can lead to complete response and tumor remission. The mode of action of such antibodies is through inhibition of CTLA-4 or PD-1 that the tumors have co-opted as protection from an anti-tumor immune response. By inhibiting these “checkpoint” molecules (e.g., with an antagonistic antibody), a subject's CD8+ T cells may be allowed to proliferate and destroy tumor cells.

[0656] Thus, the engineered erythroid cells or enucleated cells comprising an enucleated cell or erythroid cell presenting (e.g. comprising on the cell surface) one or more exogenous polypeptides provided herein can be used in combination with one or more blocking antibodies targeted to an immune “checkpoint” molecule. For instance, in some embodiments, the compositions provided herein can be used in combination with one or more blocking antibodies targeted to a molecule such as CTLA-4 or PD-1. For example, the compositions provided herein may be used in combination with an agent that blocks, reduces and/or inhibits PD-1 and PD-L1 or PD-L2 and/or the binding of PD-1 with PD-L1 or PD-L2 (by way of non-limiting example, one or more of nivolumab (ONO-4538/BMS-936558, MDX1106, OPDIVO, BRISTOL MYERS SQUIBB), pembrolizumab (KEYTRUDA, Merck), pidilizumab (CT-011, CURE TECH), MK-3475 (MERCK), BMS 936559 (BRISTOL MYERS SQUIBB), MPDL328OA (ROCHE)). In an embodiment, the compositions provided herein may be used in combination with an agent that blocks, reduces and/or inhibits the activity of CTLA-4 and/or the binding of CTLA-4 with one or more receptors (e.g. CD80, CD86, AP2M1, SHP-2, and PPP2R5A). For instance, in some embodiments, the immune-modulating agent is an antibody such as, by way of non-limitation, ipilimumab (MDX-010, MDX-101, Yervoy, BMS) and/or tremelimumab (Pfizer). Blocking antibodies against these molecules can be obtained from, for example, Bristol Myers Squibb (New York, N.Y.), Merck (Kenilworth, N.J.), Medlmmune (Gaithersburg, Md.), and Pfizer (New York, N.Y.).

[0657] Further, the engineered erythroid cell or enucleated cell compositions provided herein can be used in combination with one or more blocking antibodies targeted to an immune “checkpoint” molecule such as for example, BTLA, HVEM, TIM3, GALS, LAG3, VISTA, KIR, 2B4, CD160 (also referred to as BY55), CGEN-15049, CHK 1 and CHK2 kinases, A2aR, CEACAM (e.g., CEACAM-1, CEACAM-3 and/or CEACAM-5), GITR, GITRL, galectin-9, CD244, CD160, TIGIT, SIRPa, ICOS, CD172a, and TMIGD2 and various B-7 family ligands (including, but are not limited to, B7-1, B7-2, B7-DC, B7-H1, B7-H2, B7-H3, B7-H4, B7-H5, B7-H6 and B7-H7).

[0658] In some embodiments of the above aspects and embodiments, the erythroid cell is an enucleated erythroid cell. In some embodiments of the above aspects and embodiments, the erythroid cell is a nucleated erythroid cell.

[0659] In some embodiments, the disclosure features a pharmaceutical composition comprising a plurality of the engineered erythroid cells described herein, and a pharmaceutical carrier. In other embodiments, the disclosure features a pharmaceutical composition comprising a population of engineered erythroid cells as described herein, and a pharmaceutical carrier. It will be understood that any single engineered erythroid cell, plurality of engineered erythroid cells, or population of engineered erythroid cells as described elsewhere herein may be present in a pharmaceutical composition of the disclosure.

[0660] In some embodiments, the pharmaceutical compositions provided herein comprise engineered (i.e. modified) erythroid cells and unmodified erythroid cells. For example, a single unit dose of erythroid cells (e.g., modified and unmodified erythroid cells) can comprise, in various embodiments, about, at least, or no more than 10%, 20%, 30%, 40%, 50%, 60%, 70%, 75%, 80%), 85%, 90%, 95%, or 99% engineered erythroid cells, wherein the remaining erythroid cells in the composition are not engineered.

[0661] In some embodiments, the pharmaceutical compositions provided herein comprise engineered erythroid cells or enucleated cells and nucleated erythroid cells. For example, a single unit dose of engineered erythroid cells (e.g., enucleated and nucleated erythroid cells) can comprise, in various embodiments, about, or at least 10%, 20%, 30%, 40%, 50%, 60%, 70%, 75%, 80%, 85%, 90%, 91%, 92%, 93%, 94%, 95%, 96%, 97%, 98%, or 99% enucleated erythroid cells, wherein the remaining erythroid cells in the composition are nucleated.

### EXAMPLES

### Example 1

### Engineered Enucleated Erythroid Cells Including Loadable Antigen-presenting Polypeptides Can Be Loaded with Antigenic Polypeptide and Activate Antigen-specific T-Cell Receptors

[0662] To determine whether engineered enucleated erythroid cells comprising an exogenous loadable antigen-presenting polypeptide can be loaded (e.g., specifically bound to exogenous antigenic polypeptides) and whether once loaded they are capable of activating antigen-specific T-cell receptors (TCRs), the following experiments were performed.

[0663] Briefly, engineered enucleated erythroid cells were generated which included either: (1) an antigen-presenting polypeptide comprising wild-type HLA*02:01 polypeptide, β2M polypeptide, GPA, and FLAG-tag (“wt HLA-A2”), as shown in SEQ ID NO:38 (below),

(SEQ ID NO: 38)
MSRSVALAVLALLSLSGLEAIQRTPKIQVYSRHPAENGKSNFLNCYVSGF
HPSDIEVDLLKNGERIEKVEHSDLSFSKDWSFYLLYYTEFTPTEKDEYAC
RVNHVTLSQPKIVKWDRDMGGGGSGGGGSGGGGSGGGGSGSHSMRYFFTS
VSRPGRGEPRFIAVGYVDDTQFVRFDSDAASQRMEPRAPWIEQEGPEYWD
GETRKVKAHSQTHRVDLGTLRGYYNQSEAGSHTVQRMYGCDVGSDWRFLR
GYHQYAYDGKDYIALKEDLRSWTAADMAAQTTKHKWEAAHVAEQLRAYLE
GTCVEWLRRYLENGKETLQRTDAPKTHMTHHAVSDHEATLRCWALSFYPA
EITLTWQRDGEDQTQDTELVETRPAGDGTFQKWAAVVVPSGQEQRYTCHV
QHEGLPKPLTLRWEPSSQPTIPIGSGSGSGSDYKDDDDKGSGSGSGSLST
TEVAMHTSTSSSVTKSYISSQTNDTHKRDTYAATPRAHEVSEISVRTVYP
PEEETGERVQLAHHFSEPEITLIIFGVMAGVIGTILLISYGIRRLIKKSP
SDVKPLPSPDTDVPLSSVEIENPETSDQ;

[0664] (2) a loadable antigen-presenting polypeptide comprising mutant HLA*02:01 polypeptide having the amino acid substitutions Y84C and A139C, β2M polypeptide, GPA, and a FLAG-tag, (“ds HLA-A2”), as shown in SEQ ID NO:39 (below),

(SEQ ID NO: 39)
MSRSVALAVLALLSLSGLEAIQRTPKIQVYSRHPAENGKSNFLNCYVSGF
HPSDIEVDLLKNGERIEKVEHSDLSFSKDWSFYLLYYTEFTPTEKDEYAC
RVNHVTLSQPKIVKWDRDMGGGGSGGGGSGGGGSGGGGSGSHSMRYFFTS
VSRPGRGEPRFIAVGYVDDTQFVRFDSDAASQRMEPRAPWIEQEGPEYWD
GETRKVKAHSQTHRVDLGTLRGCYNQSEAGSHTVQRMYGCDVGSDWRFLR
GYHQYAYDGKDYIALKEDLRSWTAADMCAQTTKHKWEAAHVAEQLRAYLE
GTCVEWLRRYLENGKETLQRTDAPKTHMTHHAVSDHEATLRCWALSFYPA
EITLTWQRDGEDQTQDTELVETRPAGDGTFQKWAAVVVPSGQEQRYTCHV
QHEGLPKPLTLRWEPSSQPTIPIGSGSGSGSDYKDDDDKGSGSGSGSLST
TEVAMHTSTSSSVTKSYISSQTNDTHKRDTYAATPRAHEVSEISVRTVYP
PEEETGERVQLAHHFSEPEITLIIFGVMAGVIGTILLISYGIRRLIKKSP
SDVKPLPSPDTDVPLSSVEIENPETSDQ;
or

[0665] (3) a fusion polypeptide comprising an HPV E7 peptide, mutant HLA*02:01 polypeptide having the amino acid substitution Y84A, β2M polypeptide, GPA, and FLAG-tag (“sc trimer”), as shown in SEQ ID NO: 40 (below),

(SEQ ID NO: 40)
MSRSVALAVLALLSLSGLEAYMLDLQPETGGGGSGGGGSGGGGSIQRTPK
IQVYSRHPAENGKSNFLNCYVSGFHPSDIEVDLLKNGERIEKVEHSDLSF
SKDWSFYLLYYTEFTPTEKDEYACRVNHVTLSQPKIVKWDRDMGGGGSGG
GGSGGGGSGGGGSGSHSMRYFFTSVSRPGRGEPRFIAVGYVDDTQFVRFD
SDAASQRMEPRAPWIEQEGPEYWDGETRKVKAHSQTHRVDLGTLRGAYNQ
SEAGSHTVQRMYGCDVGSDWRFLRGYHQYAYDGKDYIALKEDLRSWTAAD
MAAQTTKHKWEAAHVAEQLRAYLEGTCVEWLRRYLENGKETLQRTDAPKT
HMTHHAVSDHEATLRCWALSFYPAEITLTWQRDGEDQTQDTELVETRPAG
DGTFQKWAAVVVPSGQEQRYTCHVQHEGLPKPLTLRWEPSSQPTIPIGSG
SGSGSEDGSGSGSGSLSTTEVAMHTSTSSSVTKSYISSQTNDTHKRDTYA
ATPRAHEVSEISVRTVYPPEEETGERVQLAHHFSEPEITLIIFGVMAGVI
GTILLISYGIRRLIKKSPSDVKPLPSPDTDVPLSSVEIENPETSDQ,

[0666] To generate the engineered enucleated erythroid cells, human CD34+ erythroid precursor cells derived from mobilized peripheral blood cells from normal human donors were obtained. The expansion/differentiation procedure comprised 3 stages. In the first stage, thawed CD34+ erythroid precursor cells were cultured in Iscove's MDM medium supplemented with albumin, recombinant human insulin, human transferrin, recombinant human fms-like tyrosine kinase 3 ligand, recombinant human stem cell factor, recombinant human interleukin 3, and recombinant human interleukin 6 at a seeding density of 1E5 cells/mL for 7 days. In the second stage, erythroid cells were cultured in Iscove's MDM medium supplemented with recombinant human insulin, human transferrin, dexamethasone, lipid mixture, recombinant human interleukin 3, human recombinant stem cell factor, human recombinant erythropoietin, and L-glutamine at a starting density of 1E5 cells/mL for 7 days. In the third stage, erythroid cells were cultured in Iscove's MDM medium supplemented with human transferrin, recombinant human insulin, human recombinant erythropoietin, recombinant human stem cell factor, human AB serum, human peripheral blood plasma, and heparin sodium salt at a starting density of 1E5 cells/mL for 9 days. Fresh differentiation medium was added to the cultures on various days. The cultures were maintained at 37° C. in 5% CO2 incubator. On day 7 of the culture process described above, precursor cells were transduced with a lentiviral vector including the gene encoding the polypeptide of interest (e.g., a loadable antigen-presenting polypeptide). Transduction reactions were incubated overnight at 37° C. The following day, erythroid cells were gently spun down at 2,000 rpm for 5 minutes, supernatant removed, and the cells were re-suspended in fresh erythroid differentiation medium and cultured further at 37° C.

[0667] The fusion polypeptide described in “(3)” above was used as control since it already includes the antigenic polypeptide and does not need to be loaded with an additional antigenic polypeptide. To load the antigen-presenting polypeptides, the engineered erythroid cells described above were contacted with HPV E7 antigenic polypeptide (YMLDLQPET; SEQ ID NO:41) in serum-free Iscove's modified Dulbecco's media (IMDM) including 1 μg/mL peptide for 90 minutes at 37° C. Following this period, cells were briefly washed twice with phosphate-buffered saline (PBS), followed by a single wash with IMDM with serum, and cultured in Iscove's MDM medium supplemented with human serum albumin, recombinant human insulin, human transferrin, human recombinant erythropoietin, and human plasma, and then the cells were cultured in the latter media at 37° C. for up to 6 days (as indicated).

[0668] To assess the ability of the engineered enucleated erythroid cells to activate TCRs with specificity for the loaded HPV E7 peptide, TCR activity assays were performed. Briefly, NFAT-Luc reporter T lymphocyte cell line (InvivoGenTM) engineered to express an HPV E7-specific TCR were contacted for 18-22 hours with different amounts of engineered enucleated erythroid cells that had been cultured for 0, 3, or 6 days. The reporter T lymphocyte cell line was used to assess the ability of the engineered erythroid cells to activate signaling pathways following TCR engagement, which was measured by determining the levels of luciferase in the cell culture suspension using QUANTI-Luc™ (Invivogen™), a luciferase detection reagent, as instructed by the manufacturer. Measured signal was normalized to the baseline luminescence activity of the T lymphocyte reporter cells and expressed as fold increase in luminescense.

[0669] As shown in FIG. 3A, a dose-dependent response was observed when the reporter T lymphocytes were contacted with antigen-loaded engineered enucleated erythroid cells including either the wt HLA-A2 or the ds HLA-A2 antigen-presenting polypeptides which had been cultured for 0 days.

[0670] A dose-dependent response was also observed when the reporter T lymphocytes were contacted with antigen-loaded engineered enucleated erythroid cells including wt HLA-A2 after 3 days of culture (FIG. 3B). However, none or minimal activity was observed when the reporter T lymphocytes were contacted with antigen-loaded engineered enucleated erythroid cells including ds HLA-A2 after 3 days of culture. Without wishing to be bound by any particular theory, it is believed that the lack of activity observed using cells that had been cultured for 3 days may be attributed to HPV E7 antigenic polypeptide unloading from the ds HLA-A2 exogenous antigen-presenting polypeptide.

[0671] Finally, none or minimal activity was observed when the reporter T lymphocytes were contacted with antigen-loaded engineered enucleated erythroid cells including either ds HLA-A2 or wt HLA-A2 after 6 days of culture, while the engineered enucleated erythroid cells including sc trimer were capable of inducing a response (FIG. 3C).

### Example 2

### Antigen-Presenting Polypeptide Cell Surface Levels are Stable on Engineered Enucleated Erythroid Cells Regardless of the Loading Status of the Polypeptide

[0672] To examine the stability of the antigen-presenting polypeptides on the cell surface of engineered enucleated erythroid cells over time, the level of the polypeptides was monitored on cells that included either the wt HLA-A2 or the ds HLA-A2 antigen-presenting polypeptides (described in Example 1 above), in either an unloaded state or after being loaded with the HPV E7 peptide. Briefly, the engineered enucleated erythroid cells were either unloaded or were loaded with HPV E7 peptide as described in Example 1. The cells were cultured in Iscove's MDM medium supplemented with human serum albumin, recombinant human insulin, human transferrin, human recombinant erythropoietin, and human plasma for a period of 10 days at 37° C. At days 0, 3, 5, 7, and 10, cells were analyzed by flow cytometry after staining with either anti-β2M antibody, or anti-HLA-A2 antibody.

[0673] As shown in FIG. 4A (cells stained with anti-β2M antibody), a minimal reduction in signal intensity (expressed in Mean Fluorescence Intensity (MFI)) was observed in cells stained with anti-β2M antibody from day 0 to day 3; however, the signal intensity remained stable from days 3 through 10. Further, as shown in FIG. 4B (cells stained with anti-HLA-A2 antibody), a reduction in signal intensity was not observed when the cells were stained with anti-HLA-A2 antibody. This data demonstrates that the cell surface levels of both the wt HLA-A2 or the ds HLA-A2 antigen-presenting polypeptides were stable on the engineered enucleated erythroid cells regardless of the loading status of the antigen-presenting polypeptides.

### Example 3

### Engineered Enucleated Erythroid Cells Including Antigen-Presenting Polypeptides Can Be Loaded with Multiple Antigenic Polypeptides and Specifically Activate TCRs

[0674] To determine whether engineered enucleated erythroid cells including a loadable antigen-presenting polypeptide are loadable with multiple antigenic polypeptides and capable of activating multiple antigen-specific TCRs, the following experiment was performed. Briefly, engineered enucleated erythroid cells including either the wt HLA-A2 or the ds HLA-A2 antigen-presenting polypeptides (described in Example 1 above), or a loadable antigen-presenting polypeptide comprising mutant HLA*02:01 polypeptide having the amino acid substitutions Y84C and A139C, β2M polypeptide, and GPA (“ds HLA-A2 without FLAG”), as shown in SEQ ID NO:42 (below), were used.

(SEQ ID NO: 42)
MSRSVALAVLALLSLSGLEAIQRTPKIQVYSRHPAENGKSNFLNCYVSGF
HPSDIEVDLLKNGERIEKVEHSDLSFSKDWSFYLLYYTEFTPTEKDEYAC
RVNHVTLSQPKIVKWDRDMGGGGSGGGGSGGGGSGGGGSGSHSMRYFFTS
VSRPGRGEPRFIAVGYVDDTQFVRFDSDAASQRMEPRAPWIEQEGPEYWD
GETRKVKAHSQTHRVDLGTLRGCYNQSEAGSHTVQRMYGCDVGSDWRFLR
GYHQYAYDGKDYIALKEDLRSWTAADMCAQTTKHKWEAAHVAEQLRAYLE
GTCVEWLRRYLENGKETLQRTDAPKTHMTHHAVSDHEATLRCWALSFYPA
EITLTWQRDGEDQTQDTELVETRPAGDGTFQKWAAVVVPSGQEQRYTCHV
QHEGLPKPLTLRWEPSSQPTIPIGSGSGSGSEDGSGSGSGSLSTTEVAMH
TSTSSSVTKSYISSQTNDTHKRDTYAATPRAHEVSEISVRTVYPPEEETG
ERVQLAHHFSEPEITLIIFGVMAGVIGTILLISYGIRRLIKKSPSDVKPL
PSPDTDVPLSSVEIENPETSDQ

[0675] The cells were loaded simultaneously with both HPV E7 antigenic polypeptide (YMLDLQPET; SEQ ID NO:41) and HPV E6 antigenic polypeptide (TIHDIILECV; SEQ ID NO:43) by contacting the cells with serum-free IMDM including either 10 μg/mL, 1 μg/mL, or 100 ng/mL of each antigenic polypeptide, as described in Example 1. As positive control, engineered erythroid cells including the sc trimer fusion polypeptide (see Example 1) were used. As negative control, erythroid cells generated from untransduced erythroid precursor cells were used.

[0676] The ability of the engineered enucleated erythroid cells to activate TCRs with specificity for either the loaded HPV E7 peptide or the loaded HPV E6 peptide was assessed using TCR activity assays. The TCR activity assays were performed as described in Example 1 using NFAT-Luc reporter T lymphocyte cell lines (InvivoGen™) engineered to express either an HPV E7-specific TCR or an HPV E6-specific TCR.

[0677] As shown in FIGS. 5A, 5B, and 5C, a dose-dependent response was observed when the reporter T lymphocytes including an HPV E7-specific TCR were contacted with engineered erythroid cells including the HPV E7 antigenic polypeptide loaded-wt HLA-A2, ds HLA-A2, or ds HLA-A2 without FLAG antigen-presenting polypeptides at all used loading concentrations of antigenic polypeptide. Further, as shown in FIGS. 5D, 5E, and 5F, engineered erythroid cells including the HPV E6 antigenic polypeptide loaded-wt HLA-A2, ds HLA-A2, and ds HLA-A2 without FLAG antigen-presenting polypeptides activated HPV E6-specific TCRs at all loading concentrations of HPV E6 antigenic polypeptide used. Moreover, engineered erythroid cells including the sc trimer fusion polypeptide did not induce a response in reporter T lymphocytes that expressed the HPV E6-specific TCR since the fusion polypeptide includes the HPV E7 antigenic polypeptide (and not the HPV E6 antigenic polypeptide).

[0678] To confirm that the response observed when reporter T lymphocytes were contacted with engineered enucleated erythroid cells including loadable antigen-presenting polypeptides was specific, cells including either the wt HLA-A2, the ds HLA-A2, or the ds HLA-A2 without FLAG antigen-presenting polypeptides were used. The cells were either unloaded (i.e., were not contacted with antigenic polypeptide to load the antigen-presenting polypeptides), or were loaded with either HPV E7 antigenic polypeptide (YMLDLQPET; SEQ ID NO:41) or HPV E6 antigenic polypeptide (TIHDIILECV; SEQ ID NO:43) as described in Example 1. Cells including the unloaded antigen-presenting polypeptides were used to perform TCR activity assays using reporter T lymphocytes that expressed either an HPV E7-specific TCR or an HPV E6-specific TCR. In addition, cells including antigen-presenting polypeptides that were loaded with HPV E6 antigenic polypeptide were used to perform TCR activity assays using the reporter T lymphocytes that expressed an HPV E7-specific TCR, while cells that were loaded with HPV E7 antigenic polypeptide were used in TCR activity assays using reporter T lymphocytes that expressed an HPV E6-specific TCR. As positive control, engineered enucleated erythroid cells including the sc trimer fusion polypeptide were used to perform TCR activity assays using reporter T lymphocytes that expressed either an HPV E7-specific TCR or an HPV E6-specific TCR.

[0679] As shown in FIG. 6, no activity was observed when cells including unloaded antigen-presenting polypeptides were used (see data corresponding to “Non-pulsed+E7 TCR” and “Non-pulsed+E6 TCR”). Engineered enucleated erythroid cells including the sc trimer fusion polypeptide solely activated reporter T lymphocytes that expressed HPV E7-specific TCR, but not reporter T lymphocytes that expressed HPV E6-specific TCR. Additionally, no activity was observed when either i) cells including antigen-presenting polypeptides loaded with HPV E6 antigenic polypeptide were contacted with the reporter T lymphocytes that expressed an HPV E7-specific TCR; or ii) cells including antigen-presenting polypeptides loaded with HPV E7 antigenic polypeptide were contacted with the reporter T lymphocytes that expressed an HPV E6-specific TCR. Thus, the engineered enucleated cells including loadable antigen-presenting polypeptides are capable of activating TCRs that are specific for the loaded antigenic polypeptide.

### Example 4

### Loadable Antigen-Presenting Polypeptide Including Mutant HLA*02:01 Exhibits Faster Antigenic Polypeptide Loading as Compared to Antigen-Presenting Polypeptides Including Wild-Type HLA*02:01

[0680] To examine the antigenic polypeptide loading kinetics of loadable antigen-presenting polypeptides, the following experiment was performed. Briefly, engineered enucleated erythroid cells including either the wt HLA-A2, or the mutant ds HLA-A2 antigen-presenting polypeptides were labeled as described in Example 1 with 10 ng/mL of one of two tetramethylrhodamine (TAMRA)-labeled versions of the HPV E7 antigenic polypeptides: HPV E7-GGK (YMLDLQPETGGK, where the lysine (K) residue was TAMRA-labeled (SEQ ID NO:44) or HPV E7-E18K (YMLDLQPKT, where the lysine (K) residue was TAMRA-labeled (SEQ ID NO:45) over about 90 minutes at 4° C., room temperature (RT), or 37° C. Binding kinetics were measured by detecting the intensity of fluorescent signal on the cells after antigenic polypeptide loading using flow cytometry.

[0681] As shown in FIGS. 7A-7C, at all temperatures tested, the HPV E7-E18K fluorescent peptide loaded more rapidly than the HPV E7-GGK fluorescent peptide onto cells including the wt HLA-A2 antigen-presenting polypeptide, and onto cells including the ds HLA-A2 loadable antigen-presenting polypeptide. However, the on-rate kinetics were observed to be faster on cells including the ds HLA-A2 loadable antigen-presenting polypeptide as compared to the on-rate kinetics for cells including the wt HLA-A2 antigen-presenting polypeptide. Without wishing to be bound by any particular theory, it is believed that the differences in on-rate kinetics may be due to increased affinity for the HPV E7 antigenic polypeptide.

### Example 5

### Engineered Enucleated Erythroid Cells Including Loadable Antigen-Presenting Polypeptides Loaded with a CMV Antigenic Polypeptide are Capable of Activating and Inducing the Expansion of CMV-Specific T-Cells

[0682] To assess the ability of engineered enucleated erythroid cells including a loadable antigen-presenting polypeptide loaded with an exogenous antigenic polypeptide to activate antigenic-peptide-specific T cells, the following experiments were performed using human engineered enucleated erythroid cells including either the wt HLA-A2 or the mutant ds HLA-A2 antigen-presenting polypeptides, that were generated as described in Example 1.

[0683] First, to assess the ability of the CMV antigenic polypeptide-loaded engineered enucleated erythroid cells to activate CMV-specific TCRs the following experiment was performed. The engineered enucleated erythroid cells were loaded with a CMV antigenic polypeptide by resuspending 2×10′ cells/mL in RPMI supplemented with 10% fetal bovine serum containing 1 μg/ml of a CMV antigenic polypeptide (NLVPMVATV; SEQ ID NO: 155) for 90 minutes at 37° C. The cells were subsequently washed twice with PBS and once with RPMI supplemented with 10% fetal bovine serum. Subsequently, the engineered enucleated erythroid cells were contacted with CMV-specific CD8+ T cells obtained from an HLA-A2-restricted donor for 4 hours at 10:1, 2:1, or 0.4:1 erythroid cell to T-cell ratio. As negative controls, erythroid cells generated from untransduced erythroid precursor cells, contacted with CMV antigenic polypeptide (UNT-pulsed) or not contacted with CMV antigenic polypeptide (UNT-non-pulsed) were used.

[0684] The extent of TCR activation for each condition was measured by performing flow cytometry to identify the frequency of T cells having elevated expression levels of intracellular NFAT (FIG. 8B) or intracellular Nur77 (FIG. 8C). Briefly, the cells were fixed with IC Fixation Buffer (Invitrogen™), permeabilized with Permabilization Buffer (InvitrogenTM) containing both PE anti-NFATc1 (BioLegend®) and Alexa Fluor® 647 anti-Nur77 monoclonal antibodies (BD BIOSCIENCES) and analyzed using flow cytometry.

[0685] As shown in FIGS. 8A and 8B, increased expression levels of NFAT and Nur77 was observed when the CMV-specific CD8+ T cells were contacted with engineered enucleated erythroid cells including the CMV antigenic polypeptide-loaded-wt HLA-A2, or ds HLA-A2 polypeptides, which was indicative of robust activation of CMV-specific CD8+ T cells. In contrast, T cells contacted with the control enucleated erythroid cells exhibited background expression levels of NFAT and Nur77, which was indicative of minimal TCR activation.

[0686] Second, to assess the ability of the CMV antigenic polypeptide-loaded engineered enucleated erythroid cells to induce the expansion of CMV-specific CD8⁺ T cells, the following experiment was performed. The engineered enucleated were loaded with the CMV antigenic polypeptide by resuspeding the 2 ×10⁶ cells/mL in serum free X-VIVO™ 15 media contiaing 1 μg/m of a CMV antigenic polypeptide (NLVPMVATV; SEQ ID NO: 155) for 90 minutes at 37° C. The cells were subsequently washed twice with PBS and once with serum-free X-VIVO™ 15. Subsequently, the CMV antigenic polypeptide-loaded engineered enucleated erythroid cells were contacted with PBMCs obtained from the same HLA-A2-restricted donor as the above experiment at 4:1 erythroid cell to T-cell ratio, in the presence of a second population of engineered enucleated erythroid cells having a two exogenous polypeptides on the cell surface: a first exogenous polypeptide comprising IL-12 and a second exogenous polypeptide comprising 4-1BBL. As negative controls, erythroid cells generated from untransduced erythroid precursor cells, contacted with CMV antigenic polypeptide (UNT-pulsed) were used. Following 5 days of incubation, the cell mixture was stained with fluorescently labelled CMV-HLA-A2 tetramer and analyzed by flow cytometry to quantify CMV-specific T cell expansion.

[0687] As shown in FIG. 8D, robust expansion of CMV-specific T cells was observed when the PBMCs were contacted with engineered enucleated erythroid cells including the CMV antigenic polypeptide-loaded-wt HLA-A2, or ds HLA-A2 polypeptides, as compared to PBMCs contacted with control cells (UNT-pulsed).

[0688] These experiments demonstrated that engineered enucleated erythroid cells including a loadable antigen-presenting polypeptide which was loaded with CMV antigenic polypeptide were capable achieve robust TCR activation and expansion of primary T cells.

### Example 6

### Loadable Antigen-Presenting Polypeptides Including HLA Class II Polypeptides Can Be Stably Expressed on the Surface of Mammalian Cells

[0689] To determine whether antigenic polypeptide-unloaded exogenous loadable antigen-presenting polypeptides comprising HLA class II polypeptides could be stably expressed on the surface of mammalian cells, the following experiments were performed.

[0690] K562 cells comprising a loadable antigen-presenting polypeptide including HLA class II polypeptides (as depicted in FIG. 9A) were generated by transducing K562 cells with lentivirus encoding the following:
[0691] (1) an antigen-presenting polypeptide comprising wild-type HLA-DRA*01:01 polypeptide (excluding the native transmembrane domain and cytosolic region), a GlySer linker, HLA-DRB1*01:01 polypeptide (excluding the native transmembrane domain and cytosolic region) and a GPA transmembrane domain, as shown in SEQ ID NO: 1591 (below):

MSRSVALAVLALLSLSGLEAGDTRPRFLWQLKFECHFFNGTERVRLLERC
IYNQEESVRFDSDVGEYRAVTELGRPDAEYWNSQKDLLEQRRAAVDTYCR
HNYGVGESFTVQRRVEPKVTVYPSKTQPLQHHNLLVCSVSGFYPGSIEVR
WFRNGQEEKAGVVSTGLIQNGDWTFQTLVMLETVPRSGEVYTCQVEHPSV
TSPLTVEWRARSESAQSKTGSGGGGSGGGGSGGGGSGGGGSGTIKEEHVI
IQAEFYLNPDQSGEFMFDFDGDEIFHVDMAKKETVWRLEEFGRFASFEAQ
GALANIAVDKANLEIMTKRSNYTPITNVPPEVTVLTNSPVELREPNVLIC
FIDKFTPPVVNVTWLRNGKPVTTGVSETVFLPREDHLFRKFHYLPFLPST
EDVYDCRVEHWGLDEPLLKHWEFDAPSPLPETTELSTTEVAMHTSTSSSV
TKSYISSQTNDTHKRDTYAATPRAHEVSETSVRTVYPPEEETGERVQLAH
HFSEPEITLIIFGVMAGVIGTILLISYGIRRLIKKSPSDVKPLPSPDTDV
PLSSVEIENPETSDQ (signal sequence underlined);

or
[0692] (2) a loadable antigen-presenting polypeptide comprising HLA-DPA1*01:03 polypeptide (excluding the native transmembrane domain and cytosolic region), a GlySer linker, HLA-DPB1*04:01 polypeptide (excluding the native transmembrane domain and cytosolic region), and a GPA transmembrane domain, as shown in SEQ ID NO: 1592 (below),

MSRSVALAVLALLSLSGLEARATPENYLFQGRQECYAFNGTQRFLERYIY
NREEFARFDSDVGEFRAVTELGRPAAEYWNSQKDILEEKRAVPDRMCRHN
YELGGPMTLQRRVQPRVNVSPSKKGPLQHHNLLVCHVTDFYPGSIQVRWF
LNGQEETAGVVSTNLIRNGDWTFQILVMLEMTPQQGDVYTCQVEHTSLDS
PVTVEWKAQSDSARSKTLTGAGGTGSGGGGSGGGGSGGGGSGGGGSGTAG
AIKADHVSTYAAFVQTHRPTGEFMFEFDEDEMFYVDLDKKETVWHLEEFG
QAFSFEAQGGLANIAILNNNLNTLIQRSNHTQATNDPPEVTVFPKEPVEL
GQPNTLICHIDKFFPPVLNVTWLCNGELVTEGVAESLFLPRTDYSFHKFH
YLTFVPSAEDFYDCRVEHWGLDQPLLKHWEAQEPIQMPETTELSTTEVAM
HTSTSSSVTKSYISSQTNDTHKRDTYAATPRAHEVSEISVRTVYPPEEET
GERVQLAHHFSEPEITLIIFGVMAGVIGTILLISYGIRRLIKKSPSDVKP
LPSPDTDVPLSSVEIENPETSDQ (signal sequence
underlined).

[0693] Expression of the loadable antigen-presenting polypeptide including HLA class II polypeptides was detected by staining the cells with either anti-HLA-DR/DP monoclonal antibody (MEM-136)—APC (Thermo Fisher Scientific) or anti-HLA-DR mouse antibody (LN3)—PE/Cy5® (ABCAM). As shown in FIGS. 9B and 9C, expression of both of the loadable antigen-presenting polypeptide including HLA class II polypeptides was observed on the transduced K562 cells. These results demonstrate that exogenous loadable antigen-presenting polypeptides comprising HLA class II polypeptides which have not been loaded with antigenic polypeptide can be successfully expressed on the surface of mammalian cells.

[0694] The contents of International Patent Publication No. WO 2019/126818 are hereby incorporated by reference in its entirety.

[0695] All publications, patents, and patent applications mentioned herein are hereby incorporated by reference in their entirety as if each individual publication, patent or patent application was specifically and individually indicated to be incorporated by reference. In case of conflict, the present application, including any definitions herein, will control.

1. An engineered enucleated erythroid cell comprising a loadable exogenous antigen-presenting polypeptide on its cell surface, wherein the loadable exogenous antigen-presenting polypeptide comprises one or more amino acid substitutions which stabilize the loadable exogenous antigen-presenting polypeptide on the cell surface.

2. The engineered enucleated erythroid cell of claim 1, wherein the loadable exogenous antigen-presenting polypeptide is stabilized in the absence of a polypeptide bound to the exogenous antigen-presenting polypeptide.

3. The engineered enucleated erythroid cell of claim 1, wherein the engineered enucleated erythroid cell further comprises an exogenous antigenic polypeptide bound to the loadable exogenous antigen-presenting polypeptide.

4. The engineered enucleated erythroid cell of claim 1, wherein the loadable exogenous antigen-presenting polypeptide has a higher affinity for an exogenous antigenic polypeptide than for an exogenous displaceable polypeptide.

5. (canceled)

6. The engineered enucleated erythroid cell of claim 3, wherein the exogenous antigenic polypeptide comprises an amino acid sequence provided in any one of Tables 7-8, 16-26, and B.

7. (canceled)

8. The engineered enucleated erythroid cell of claim 3, wherein the exogenous antigenic polypeptide is non-covalently attached to the loadable exogenous antigen-presenting polypeptide.

9. The engineered enucleated erythroid cell of claim 3, wherein the exogenous antigenic polypeptide is covalently attached to the loadable exogenous antigen-presenting polypeptide.

10. (canceled)

11. The engineered enucleated erythroid cell of claim 9 or 10, wherein exogenous antigenic polypeptide comprises a reactive functional group that forms a covalent bond with an amino acid residue of the loadable exogenous antigen-presenting polypeptide, wherein the reactive functional group is a diazirine group or a thiol-reactive functional group selected from the group consisting of (i) 2-cyanobenzothiazole (CBT); (ii) maleimide or a maleimide derivative (iii) an arylpropionitrile; (iv) a sulfone; (v) an allenamide; (v) a dibromopyridazinedione; (vi) a disulfide; and (vii) a haloacetamide.

12. The engineered enucleated erythroid cell of claim 11, wherein the reactive functional group is a thiol-reactive functional group and the exogenous antigenic polypeptide is covalently linked to a cysteine residue of the loadable exogenous antigen-presenting polypeptide.

13. The engineered enucleated erythroid cell of claim 1, wherein the loadable exogenous antigen-presenting polypeptide comprises a linker, wherein the linker comprises an acceptor sequence for conjugation of an exogenous antigenic polypeptide.

14.-15. (canceled)

16. The engineered enucleated erythroid cell of claim 1, wherein the loadable exogenous antigen-presenting polypeptide comprises a transmembrane domain.

17.-18. (canceled)

19. The engineered enucleated erythroid cell of claim 1, wherein the engineered enucleated erythroid cell further comprises a displaceable exogenous polypeptide bound to the loadable exogenous antigen-presenting polypeptide.

20.-22. (canceled)

23. The engineered enucleated erythroid cell of claim 19, wherein the exogenous displaceable polypeptide comprises an amino acid sequence provided in Table 6.

24. The engineered enucleated erythroid cell of claim 19, wherein the loadable exogenous antigen-presenting polypeptide and the exogenous displaceable polypeptide are comprised in a single-chain fusion protein.

25.-34. (canceled)

35. The engineered enucleated erythroid cell of claim 24, wherein the single chain fusion protein comprises a transmembrane domain.

36.-37. (canceled)

38. The engineered enucleated erythroid cell of claim 1, wherein the loadable exogenous antigen-presenting polypeptide comprises a human leukocyte antigen a (HLA) heavy chain polypeptide and a beta-2-microglobulin (β2M) polypeptide, or a fragment thereof.

39.-42. (canceled)

43. The engineered enucleated erythroid cell of claim 38, wherein the HLA heavy chain polypeptide is derived from an HLA class I polypeptide.

44.-49. (canceled)

50. The engineered enucleated erythroid cell of claim 43, wherein the loadable exogenous antigen-presenting polypeptide comprises:
(i) an amino acid substitution to an alanine at an amino acid residue corresponding to position 84 of an HLA heavy chain polypeptide;
(ii) an amino acid substitution to a cysteine at amino acid residues corresponding to positions 84 and 139 of an HLA heavy chain polypeptide;
(iii) an amino acid substitution to a cysteine at amino acid residues corresponding to positions 51 and 175 of an HLA heavy chain polypeptide;
(iv) at least one pair of amino acid substitutions to cysteine at amino acid residues corresponding to positions 84 and 139, 51 and 175, 5 and 168, 130 and 157, 135 and 140, 11 and 74, 45 and 63, or 33 and 49 of an HLA heavy chain polypeptide;
(v) an amino acid substitution to a cysteine at an amino acid residue corresponding to position 84 of an HLA heavy chain polypeptide, a displaceable exogenous polypeptide, and a linker disposed between the β2M polypeptide and the displaceable exogenous polypeptide, wherein the linker comprises a cysteine; or
(vi) an HLA heavy chain polypeptide derived from an HLA-A*02:01 allele, wherein the HLA heavy chain polypeptide comprises an amino acid substitution to a glutamic acid at an amino acid residue corresponding to position 115 of an HLA heavy chain polypeptide.

51.-55. (canceled)

56. The engineered enucleated erythroid cell of claim 38, wherein the HLA heavy chain polypeptide is derived from an HLA class II polypeptide.

57.-62. (canceled)

63. A method of treating a subject in need of an altered immune response, the method comprising:
a) determining an HLA status of the subject;
b) selecting an engineered enucleated erythroid cell comprising a loadable exogenous antigen-presenting polypeptide on its cell surface, wherein the antigen-presenting polypeptide is immunologically-compatible with the subject, and the exogenous antigen-presenting polypeptide comprises one or more amino acid substitutions which stabilize the loadable exogenous antigen-presenting polypeptide on the cell surface;
c) contacting the engineered enucleated erythroid cell with an exogenous antigenic polypeptide; and
d) administering the engineered enucleated erythroid cell to the subject, thereby treating the subject.

64.-72. (canceled)

73. A method of making an engineered enucleated erythroid cell comprising an antigen-loaded exogenous antigen-presenting polypeptide, the method comprising:
a) obtaining an engineered enucleated erythroid cell comprising a loadable exogenous antigen-presenting polypeptide on its the cell surface, wherein the loadable exogenous antigen-presenting polypeptide comprises one or more amino acid substitutions which stabilize the loadable exogenous antigen-presenting polypeptide on the cell surface; and
b) contacting the engineered enucleated erythroid cell with an exogenous antigenic polypeptide,
thereby generating the engineered enucleated erythroid cell comprising the antigen-loaded exogenous antigen-presenting polypeptide.

74.-78. (canceled)

79. A method of making an engineered enucleated erythroid cell comprising a loadable exogenous antigen-presenting polypeptide on its cell surface, the method comprising:
introducing an exogenous nucleic acid encoding the loadable exogenous antigen-presenting polypeptide into a nucleated erythroid precursor cell, wherein the loadable exogenous antigen-presenting polypeptide comprises one or more amino acid substitutions which stabilize the loadable exogenous antigen-presenting polypeptide on the cell surface; and
culturing the nucleated erythroid precursor cell under conditions suitable for enucleation and production of the loadable exogenous antigen-presenting polypeptide, thereby making the engineered enucleated erythroid cell.

80.-111. (canceled)

The application's sequence listing, which the Patent Office published only in electronic form, follows.

SEQUENCE LISTING (1596 sequences)

SEQ ID NO: 1 - protein, 8 aa, Artificial Sequence
  Description of Artificial Sequence: Synthetic peptide
LEVLFQGP

SEQ ID NO: 2 - protein, 7 aa, Artificial Sequence
  Description of Artificial Sequence: Synthetic peptide
ENLYFQG

SEQ ID NO: 3 - protein, 5 aa, Artificial Sequence
  Description of Artificial Sequence: Synthetic peptide
  MOD_RES (4)..(4): Any amino acid
LPTXG

SEQ ID NO: 4 - protein, 13 aa, Artificial Sequence
  Description of Artificial Sequence: Synthetic peptide
AHIVMVDAYKPTK

SEQ ID NO: 5 - protein, 10 aa, Artificial Sequence
  Description of Artificial Sequence: Synthetic peptide
ATHIKFSKRD

SEQ ID NO: 6 - protein, 20 aa, Artificial Sequence
  Description of Artificial Sequence: Synthetic peptide
MSRSVALAVLALLSLSGLEA

SEQ ID NO: 7 - protein, 19 aa, Artificial Sequence
  Description of Artificial Sequence: Synthetic peptide
MYGKIIFVLLLSEIVSISA

SEQ ID NO: 8 - protein, 150 aa, Artificial Sequence [sequence omitted]

SEQ ID NO: 9 - protein, 131 aa, Artificial Sequence
  Description of Artificial Sequence: Synthetic polypeptide
LSTTEVAMHTSTSSSVTKSYISSQTNDTHKRDTYAATPRAHEVSEISVRTVYPPEEETGERVQLAHHFSEPEITLIIFGVMAGVIGTILLISYGIRRLIKKSPSDVKPLPSPDTDVPLSSVEIENPETSDQ

SEQ ID NO: 10 - protein, 20 aa, Artificial Sequence
  Description of Artificial Sequence: Synthetic peptide
GGGGSGGGGSGGGGSGGGGS

SEQ ID NO: 11 - protein, 18 aa, Artificial Sequence
  Description of Artificial Sequence: Synthetic peptide
GSGSGSGSEDGSGSGSGS

SEQ ID NO: 12 - protein, 18 aa, Artificial Sequence
  Description of Artificial Sequence: Synthetic peptide
GSGSGSGSGSGSGSGSGS

SEQ ID NO: 13 - protein, 15 aa, Artificial Sequence
  Description of Artificial Sequence: Synthetic peptide
GCGGSGGGGSGGGGS

SEQ ID NO: 14 - protein, 25 aa, Artificial Sequence
  Description of Artificial Sequence: Synthetic peptide
TGSGGGGSGGGGSGGGGSGGGGSGT

SEQ ID NO: 15 - protein, 24 aa, Artificial Sequence
  Description of Artificial Sequence: Synthetic peptide
GGSGGSGGGGGSGGGSGGGSGGGS

SEQ ID NO: 16 - protein, 26 aa, Artificial Sequence
  Description of Artificial Sequence: Synthetic peptide
SGRGGGGSGGGGSGGGGSGGGGSSPA

SEQ ID NO: 17 - protein, 24 aa, Artificial Sequence
  Description of Artificial Sequence: Synthetic peptide
GGGGSGGGGSGGGGSGGGGSGGGG

SEQ ID NO: 18 - protein, 58 aa, Artificial Sequence
  Description of Artificial Sequence: Synthetic polypeptide
SGRGASSGSSGSGSQKKPRYEIRWKVVVISAILALVVLTVISLIILIMLWGSGMQSPA

SEQ ID NO: 19 - protein, 365 aa, Homo sapiens
MAVMAPRTLLLLLSGALALTQTWAGSHSMRYFFTSVSRPGRGEPRFIAVGYVDDTQFVRFDSDAASQKMEPRAPWIEQEGPEYWDQETRNMKAHSQTDRANLGTLRGYYNQSEDGSHTIQIMYGCDVGPDGRFLRGYRQDAYDGKDYIALNEDLRSWTAADMAAQITKRKWEAVHAAEQRRVYLEGRCVDGLRRYLENGKETLQRTDPPKTHMTHHPISDHEATLRCWALGFYPAEITLTWQRDGEDQTQDTELVETRPAGDGTFQKWAAVVVPSGEEQRYTCHVQHEGLPKPLTLRWELSSQPTIPIVGIIAGLVLLGAVITGAVVAAVMWRRKSSDRKGGSYTQAASSDSAQGSDVSLTACKV

SEQ ID NO: 20 - protein, 365 aa, Homo sapiens [sequence omitted]

SEQ ID NO: 21 - protein, 365 aa, Homo sapiens
MAVMAPRTLLLLLSGALALTQTWAGSHSMRYFFTSVSRPGRGEPRFIAVGYVDDTQFVRFDSDAASQRMEPRAPWIEQEGPEYWDQETRNVKAQSQTDRVDLGTLRGYYNQSEAGSHTIQIMYGCDVGSDGRFLRGYRQDAYDGKDYIALNEDLRSWTAADMAAQITKRKWEAAHEAEQLRAYLDGTCVEWLRRYLENGKETLQRTDPPKTHMTHHPISDHEATLRCWALGFYPAEITLTWQRDGEDQTQDTELVETRPAGDGTFQKWAAVVVPSGEEQRYTCHVQHEGLPKPLTLRWELSSQPTIPIVGIIAGLVLLGAVITGAVVAAVMWRRKSSDRKGGSYTQAASSDSAQGSDVSLTACKV

SEQ ID NO: 22 - protein, 365 aa, Homo sapiens [sequence omitted]

SEQ ID NO: 23 - protein, 365 aa, Homo sapiens
MAVMAPRTLLLLLSGALALTQTWAGSHSMRYFYTSVSRPGRGEPRFIAVGYVDDTQFVRFDSDAASQRMEPRAPWIEQEGPEYWDQETRNVKAQSQTDRVDLGTLRGYYNQSEDGSHTIQIMYGCDVGPDGRFLRGYRQDAYDGKDYIALNEDLRSWTAADMAAQITKRKWEAAHAAEQQRAYLEGRCVEWLRRYLENGKETLQRTDPPKTHMTHHPISDHEATLRCWALGFYPAEITLTWQRDGEDQTQDTELVETRPAGDGTFQKWAAVVVPSGEEQRYTCHVQHEGLPKPLTLRWELSSQPTIPIVGIIAGLVLLGAVITGAVVAAVMWRRKSSDRKGGSYTQAASSDSAQGSDVSLTACKV

SEQ ID NO: 24 - protein, 365 aa, Homo sapiens
MAVMAPRTLLLLLLGALALTQTWAGSHSMRYFTTSVSRPGRGEPRFIAVGYVDDTQFVRFDSDAASQRMEPRAPWIEQEGPEYWDLQTRNVKAQSQTDRANLGTLRGYYNQSEAGSHTIQMMYGCDVGSDGRFLRGYRQDAYDGKDYIALNEDLRSWTAADMAAQITQRKWEAARVAEQLRAYLEGTCVEWLRRYLENGKETLQRTDAPKTHMTHHAVSDHEATLRCWALSFYPAEITLTWQRDGEDQTQDTELVETRPAGDGTFQKWASVVVPSGQEQRYTCHVQHEGLPKPLTLRWEPSSQPTIPIVGIIAGLVLFGAVFAGAVVAAVRWRRKSSDRKGGSYSQAASSDSAQGSDMSLTACKV

SEQ ID NO: 25 - protein, 365 aa, Homo sapiens
MAVMAPRTLLLLLLGALALTQTWAGSHSMRYFFTSVSRPGRGEPRFIAVGYVDDTQFVRFDSDAASQRMEPRAPWIEQEGPEYWDQETRNVKAHSQTDRESLRIALRYYNQSEAGSHTIQMMYGCDVGPDGRLLRGYQQDAYDGKDYIALNEDLRSWTAADMAAQITQRKWEAARVAEQLRAYLEGTCVEWLRRYLENGKETLQRTDAPKTHMTHHAVSDHEATLRCWALSFYPAEITLTWQRDGEDQTQDTELVETRPAGDGTFQKWASVVVPSGQEQRYTCHVQHEGLPKPLTLRWEPSSQPTIPIVGIIAGLVLFGAMFAGAVVAAVRWRRKSSDRKGGSYSQAASSDSAQGSDMSLTACKV

SEQ ID NO: 26 - protein, 365 aa, Homo sapiens [sequence omitted]

SEQ ID NO: 27 - protein, 9 aa, Artificial Sequence
  Description of Artificial Sequence: Synthetic peptide
YPYDVPDYA

SEQ ID NO: 28 - protein, 10 aa, Artificial Sequence
  Description of Artificial Sequence: Synthetic peptide
EQKLISEEDL

SEQ ID NO: 29 - protein, 8 aa, Artificial Sequence
  Description of Artificial Sequence: Synthetic peptide
DYKDDDDK

SEQ ID NO: 30 - protein, 365 aa, Homo sapiens [sequence omitted]

SEQ ID NO: 31 - protein, 15 aa, Artificial Sequence
  Description of Artificial Sequence: Synthetic peptide
GGGGSGGGGSGGGGS

SEQ ID NO: 32 - protein, 9 aa, Artificial Sequence
  Description of Artificial Sequence: Synthetic peptide
YPYDVPDYA

SEQ ID NO: 33 - protein, 10 aa, Artificial Sequence
  Description of Artificial Sequence: Synthetic peptide
EQKLISEEDL

SEQ ID NO: 34 - protein, 8 aa, Artificial Sequence
  Description of Artificial Sequence: Synthetic peptide
DYKDDDDK

SEQ ID NO: 35 - DNA, 54 bp, Artificial Sequence
  Description of Artificial Sequence: Synthetic oligonucleotide
gagggcagaggaagtcttctaacatgcggtgacgtggaggsgsstcccggccct

SEQ ID NO: 36 - protein, 5 aa, Artificial Sequence
  Description of Artificial Sequence: Synthetic peptide
  MOD_RES (3)..(3): Any amino acid
  See specification as filed for detailed description of substitutions and preferred embodiments
LPXTG

SEQ ID NO: 37 - protein, 5 aa, Artificial Sequence
  Description of Artificial Sequence: Synthetic peptide
  MOD_RES (3)..(3): Any amino acid
LPXTA

SEQ ID NO: 38 - protein, 578 aa, Artificial Sequence
  Description of Artificial Sequence: Synthetic polypeptide
MSRSVALAVLALLSLSGLEAIQRTPKIQVYSRHPAENGKSNFLNCYVSGFHPSDIEVDLLKNGERIEKVEHSDLSFSKDWSFYLLYYTEFTPTEKDEYACRVNHVTLSQPKIVKWDRDMGGGGSGGGGSGGGGSGGGGSGSHSMRYFFTSVSRPGRGEPRFIAVGYVDDTQFVRFDSDAASQRMEPRAPWIEQEGPEYWDGETRKVKAHSQTHRVDLGTLRGYYNQSEAGSHTVQRMYGCDVGSDWRFLRGYHQYAYDGKDYIALKEDLRSWTAADMAAQTTKHKWEAAHVAEQLRAYLEGTCVEWLRRYLENGKETLQRTDAPKTHMTHHAVSDHEATLRCWALSFYPAEITLTWQRDGEDQTQDTELVETRPAGDGTFQKWAAVVVPSGQEQRYTCHVQHEGLPKPLTLRWEPSSQPTIPIGSGSGSGSDYKDDDDKGSGSGSGSLSTTEVAMHTSTSSSVTKSYISSQTNDTHKRDTYAATPRAHEVSEISVRTVYPPEEETGERVQLAHHFSEPEITLIIFGVMAGVIGTILLISYGIRRLIKKSPSDVKPLPSPDTDVPLSSVEIENPETSDQ

SEQ ID NO: 39 - protein, 578 aa, Artificial Sequence
  Description of Artificial Sequence: Synthetic polypeptide
MSRSVALAVLALLSLSGLEAIQRTPKIQVYSRHPAENGKSNFLNCYVSGFHPSDIEVDLLKNGERIEKVEHSDLSFSKDWSFYLLYYTEFTPTEKDEYACRVNHVTLSQPKIVKWDRDMGGGGSGGGGSGGGGSGGGGSGSHSMRYFFTSVSRPGRGEPRFIAVGYVDDTQFVRFDSDAASQRMEPRAPWIEQEGPEYWDGETRKVKAHSQTHRVDLGTLRGCYNQSEAGSHTVQRMYGCDVGSDWRFLRGYHQYAYDGKDYIALKEDLRSWTAADMCAQTTKHKWEAAHVAEQLRAYLEGTCVEWLRRYLENGKETLQRTDAPKTHMTHHAVSDHEATLRCWALSFYPAEITLTWQRDGEDQTQDTELVETRPAGDGTFQKWAAVVVPSGQEQRYTCHVQHEGLPKPLTLRWEPSSQPTIPIGSGSGSGSDYKDDDDKGSGSGSGSLSTTEVAMHTSTSSSVTKSYISSQTNDTHKRDTYAATPRAHEVSEISVRTVYPPEEETGERVQLAHHFSEPEITLIIFGVMAGVIGTILLISYGIRRLIKKSPSDVKPLPSPDTDVPLSSVEIENPETSDQ

SEQ ID NO: 40 - protein, 596 aa, Artificial Sequence
  Description of Artificial Sequence: Synthetic polypeptide
MSRSVALAVLALLSLSGLEAYMLDLQPETGGGGSGGGGSGGGGSIQRTPKIQVYSRHPAENGKSNFLNCYVSGFHPSDIEVDLLKNGERIEKVEHSDLSFSKDWSFYLLYYTEFTPTEKDEYACRVNHVTLSQPKIVKWDRDMGGGGSGGGGSGGGGSGGGGSGSHSMRYFFTSVSRPGRGEPRFIAVGYVDDTQFVRFDSDAASQRMEPRAPWIEQEGPEYWDGETRKVKAHSQTHRVDLGTLRGAYNQSEAGSHTVQRMYGCDVGSDWRFLRGYHQYAYDGKDYIALKEDLRSWTAADMAAQTTKHKWEAAHVAEQLRAYLEGTCVEWLRRYLENGKETLQRTDAPKTHMTHHAVSDHEATLRCWALSFYPAEITLTWQRDGEDQTQDTELVETRPAGDGTFQKWAAVVVPSGQEQRYTCHVQHEGLPKPLTLRWEPSSQPTIPIGSGSGSGSEDGSGSGSGSLSTTEVAMHTSTSSSVTKSYISSQTNDTHKRDTYAATPRAHEVSEISVRTVYPPEEETGERVQLAHHFSEPEITLIIFGVMAGVIGTILLISYGIRRLIKKSPSDVKPLPSPDTDVPLSSVEIENPETSDQ

SEQ ID NO: 41 - protein, 9 aa, Artificial Sequence
  Description of Artificial Sequence: Synthetic peptide
YMLDLQPET

SEQ ID NO: 42 - protein, 572 aa, Artificial Sequence
  Description of Artificial Sequence: Synthetic polypeptide
MSRSVALAVLALLSLSGLEAIQRTPKIQVYSRHPAENGKSNFLNCYVSGFHPSDIEVDLLKNGERIEKVEHSDLSFSKDWSFYLLYYTEFTPTEKDEYACRVNHVTLSQPKIVKWDRDMGGGGSGGGGSGGGGSGGGGSGSHSMRYFFTSVSRPGRGEPRFIAVGYVDDTQFVRFDSDAASQRMEPRAPWIEQEGPEYWDGETRKVKAHSQTHRVDLGTLRGCYNQSEAGSHTVQRMYGCDVGSDWRFLRGYHQYAYDGKDYIALKEDLRSWTAADMCAQTTKHKWEAAHVAEQLRAYLEGTCVEWLRRYLENGKETLQRTDAPKTHMTHHAVSDHEATLRCWALSFYPAEITLTWQRDGEDQTQDTELVETRPAGDGTFQKWAAVVVPSGQEQRYTCHVQHEGLPKPLTLRWEPSSQPTIPIGSGSGSGSEDGSGSGSGSLSTTEVAMHTSTSSSVTKSYISSQTNDTHKRDTYAATPRAHEVSEISVRTVYPPEEETGERVQLAHHFSEPEITLIIFGVMAGVIGTILLISYGIRRLIKKSPSDVKPLPSPDTDVPLSSVEIENPETSDQ

SEQ ID NO: 43 - protein, 10 aa, Artificial Sequence
  Description of Artificial Sequence: Synthetic peptide
TIHDIILECV

SEQ ID NO: 44 - protein, 12 aa, Artificial Sequence
  Description of Artificial Sequence: Synthetic peptide
YMLDLQPETGGK

SEQ ID NO: 45 - protein, 9 aa, Artificial Sequence
  Description of Artificial Sequence: Synthetic peptide
YMLDLQPKT

SEQ ID NO: 46 - protein, 365 aa, Homo sapiens
MAVMAPRTLVLLLSGALALTQTWAGSHSMRYFYTSVSRPGRGEPRFIAVGYVDDTQFVRFDSDAASQRMEPRAPWIEQEGPEYWDRNTRNVKAHSQTDRESLRIALRYYNQSEDGSHTIQRMYGCDVGPDGRFLRGYQQDAYDGKDYIALNEDLRSWTAADMAAQITQRKWETAHEAEQWRAYLEGRCVEWLRRYLENGKETLQRTDAPKTHMTHHAVSDHEATLRCWALSFYPAEITLTWQRDGEDQTQDTELVETRPAGDGTFQKWASVVVPSGQEQRYTCHVQHEGLPKPLTLRWEPSSQPTIPIVGIIAGLVLFGAVIAGAVVAAVMWRRKSSDRKGGSYSQAASSDSAQGSDMSLTACKV

SEQ ID NO: 47 - protein, 365 aa, Homo sapiens
MAVMAPRTLVLLLSGALALTQTWAGSHSMRYFYTSVSRPGRGEPRFIAVGYVDDTQFVRFDSDAASQRMEPRAPWIEQEGPEYWDRNTRNVKAHSQTDRANLGTLRGYYNQSEDGSHTIQRMYGCDVGPDGRFLRGYQQDAYDGKDYIALNEDLRSWTAADMAAQITQRKWETAHEAEQWRAYLEGRCVEWLRRYLENGKETLQRTDAPKTHMTHHAVSDHEATLRCWALSFYPAEITLTWQRDGEDQTQDTELVETRPAGDGTFQKWASVVVPSGQEQRYTCHVQHEGLPKPLTLRWEPSSQPTIPIVGIIAGLVLFGAVIAGAVVAAVMWRRKSSDRKGGSYSQAASSDSAQGSDMSLTACKV

SEQ ID NO: 48 - protein, 365 aa, Homo sapiens [sequence omitted]

SEQ ID NO: 49 - protein, 365 aa, Homo sapiens [sequence omitted]

SEQ ID NO: 50 - protein, 366 aa, Homo sapiens
MRVMAPRALLLLLSGGLALTETWACSHSMRYFDTAVSRPGRGEPRFISVGYVDDTQFVRFDSDAASPRGEPRAPWVEQEGPEYWDRETQNYKRQAQADRVSLRNLRGYYNQSEDGSHTLQRMYGCDLGPDGRLLRGYDQSAYDGKDYIALNEDLRSWTAADTAAQITQRKLEAARAAEQLRAYLEGTCVEWLRRYLENGKETLQRAEPPKTHVTHHPLSDHEATLRCWALGFYPAEITLTWQRDGEDQTQDTELVETRPAGDGTFQKWAAVVVPSGQEQRYTCHMQHEGLQEPLTLSWEPSSQPTIPIMGIVAGLAVLVVLAVLGAVVTAMMCRRKSSGGKGGSCSQAACSNSAQGSDESLITCKA

SEQ ID NO: 51 - protein, 366 aa, Homo sapiens
MRVMAPRALLLLLSGGLALTETWACSHSMRYFDTAVSRPGRGEPRFISVGYVDDTQFVRFDSDAASPRGEPRAPWVEQEGPEYWDRETQKYKRQAQADRVSLRNLRGYYNQSEDGSHTLQRMSGCDLGPDGRLLRGYDQSAYDGKDYIALNEDLRSWTAADTAAQITQRKLEAARAAEQLRAYLEGTCVEWLRRYLENGKETLQRAEPPKTHVTHHPLSDHEATLRCWALGFYPAEITLTWQRDGEDQTQDTELVETRPAGDGTFQKWAAVVVPSGQEQRYTCHMQHEGLQEPLTLSWEPSSQPTIPIMGIVAGLAVLVVLAVLGAVVTAMMCRRKSSGGKGGSCSQAACSNSAQGSDESLITCKA

SEQ ID NO: 52 - protein, 366 aa, Homo sapiens
MRVMAPRTLILLLSGALALTETWACSHSMRYFYTAVSRPGRGEPRFIAVGYVDDTQFVQFDSDAASPRGEPRAPWVEQEGPEYWDRETQKYKRQAQTDRVNLRKLRGYYNQSEAGSHTLQRMYGCDLGPDGRLLRGYNQFAYDGKDYIALNEDLRSWTAADKAAQITQRKWEAAREAEQRRAYLEGTCVEWLRRYLENGKKTLQRAEHPKTHVTHHPVSDHEATLRCWALGFYPAEITLTWQRDGEDQTQDTELVETRPAGDGTFQKWAAVVVPSGEEQRYTCHVQHEGLPEPLTLRWGPSSQPTIPIVGIVAGLAVLAVLAVLGAVMAVVMCRRKSSGGKGGSCSQAASSNSAQGSDESLIACKA

SEQ ID NO: 53 - protein, 366 aa, Homo sapiens
MRVMAPRTLILLLSGALALTETWACSHSMRYFDTAVSRPGRGEPRFISVGYVDDTQFVRFDSDAASPRGEPRAPWVEQEGPEYWDRETQKYKRQAQADRVNLRKLRGYYNQSEDGSHTLQWMYGCDLGPDGRLLRGYDQSAYDGKDYIALNEDLRSWTAADTAAQITQRKWEAAREAEQWRAYLEGTCVEWLRRYLENGKETLQRAEHPKTHVTHHPVSDHEATLRCWALGFYPAEITLTWQRDGEDQTQDTELVETRPAGDGTFQKWAAVVVPSGEEQRYTCHVQHEGLPEPLTLRWEPSSQPTIPIVGIVAGLAVLAVLAVLGAVMAVVMCRRKSSGGKGGSCSQAASSNSAQGSDESLIACKA

SEQ ID NO: 54 - protein, 366 aa, Homo sapiens
MRVMAPRTLILLLSGALALTETWAGSHSMRYFSTSVSWPGRGEPRFIAVGYVDDTQFVRFDSDAASPRGEPREPWVEQEGPEYWDRETQKYKRQAQADRVNLRKLRGYYNQSEDGSHTLQRMFGCDLGPDGRLLRGYNQFAYDGKDYIALNEDLRSWTAADTAAQITQRKWEAAREAEQRRAYLEGTCVEWLRRYLENGKETLQRAEHPKTHVTHHPVSDHEATLRCWALGFYPAEITLTWQWDGEDQTQDTELVETRPAGDGTFQKWAAVVVPSGEEQRYTCHVQHEGLPEPLTLRWKPSSQPTIPIVGIVAGLAVLAVLAVLGAMVAVVMCRRKSSGGKGGSCSQAASSNSAQGSDESLIACKA

SEQ ID NO: 55 - protein, 366 aa, Homo sapiens
MRVMAPRTLILLLSGALALTETWAGSHSMRYFYTAVSRPGRGEPHFIAVGYVDDTQFVRFDSDAASPRGEPRAPWVEQEGPEYWDRETQKYKRQAQTDRVSLRNLRGYYNQSEAGSHIIQRMYGCDVGPDGRLLRGYDQYAYDGKDYIALNEDLRSWTAADTAAQITQRKWEAAREAEQLRAYLEGLCVEWLRRYLKNGKETLQRAEHPKTHVTHHPVSDHEATLRCWALGFYPAEITLTWQWDGEDQTQDTELVETRPAGDGTFQKWAAVVVPSGEEQRYTCHVQHEGLPEPLTLRWEPSSQPTIPIVGIVAGLAVLAVLAVLGAVVAVVMCRRKSSGGKGGSCSQAASSNSAQGSDESLIACKA

SEQ ID NO: 56 - protein, 366 aa, Homo sapiens [sequence omitted]

SEQ ID NO: 57 - protein, 366 aa, Homo sapiens [sequence omitted]

SEQ ID NO: 58 - protein, 366 aa, Homo sapiens
MRVMAPRTLILLLSGALALTETWACSHSMRYFYTAVSRPGRGEPRFIAVGYVDDTQFVRFDSDAASPRGEPRAPWVEQEGPEYWDRETQKYKRQAQTDRVSLRNLRGYYNQSEAGSHTLQWMYGCDLGPDGRLLRGYDQSAYDGKDYIALNEDLRSWTAADTAAQITQRKWEAARAAEQQRAYLEGTCVEWLRRYLENGKETLQRAEHPKTHVTHHLVSDHEATLRCWALGFYPAEITLTWQRDGEDQTQDTELVETRPAGDGTFQKWAAVVVPSGEEQRYTCHVQHEGLPEPLTLRWEPSSQPTIPIVGIVAGLAVLAVLAVLGAVVAVVMCRRKSSGGKGGSCSQAASSNSAQGSDESLIACKA

SEQ ID NO: 59 - protein, 366 aa, Homo sapiens [sequence omitted]

SEQ ID NO: 60 - protein, 366 aa, Homo sapiens [sequence omitted]

SEQ ID NO: 61 - protein, 366 aa, Homo sapiens
MRVMAPRTLILLLSGALALTETWACSHSMKYFFTSVSRPGRGEPRFISVGYVDDTQFVRFDSDAASPRGEPRAPWVEQEGPEYWDRETQKYKRQAQTDRVSLRNLRGYYNQSEAGSHTLQWMCGCDLGPDGRLLRGYDQYAYDGKDYIALNEDLRSWTAADTAAQITQRKWEAAREAEQRRAYLEGTCVEWLRRYLENGKETLQRAEHPKTHVTHHPVSDHEATLRCWALGFYPAEITLTWQWDGEDQTQDTELVETRPAGDGTFQKWAAVMVPSGEEQRYTCHVQHEGLPEPLTLRWEPSSQPTIPIVGIVAGLAVLAVLAVLGAVVAVVMCRRKSSGGKGGSCSQAASSNSAQGSDESLIACKA

SEQ ID NO: 62 - protein, 366 aa, Homo sapiens [sequence omitted]

SEQ ID NO: 63 - protein, 366 aa, Homo sapiens [sequence omitted]

SEQ ID NO: 64 - protein, 366 aa, Homo sapiens [sequence omitted]

SEQ ID NO: 65 - protein, 362 aa, Homo sapiens
MLVMAPRTVLLLLSAALALTETWAGSHSMRYFDTAMSRPGRGEPRFISVGYVDDTQFVRFDSDAASPREEPRAPWIEQEGPEYWDRNTQIFKTNTQTDRESLRNLRGYYNQSEAGSHTLQSMYGCDVGPDGRLLRGHNQYAYDGKDYIALNEDLRSWTAADTAAQITQRKWEAARVAEQDRAYLEGTCVEWLRRYLENGKDTLERADPPKTHVTHHPISDHEATLRCWALGFYPAEITLTWQRDGEDQTQDTELVETRPAGDRTFQKWAAVVVPSGEEQRYTCHVQHEGLPKPLTLRWEPSSQSTVPIVGIVAGLAVLAVVVIGAVVAAVMCRRKSSGGKGGSYSQAACSDSAQGSDVSLTA

SEQ ID NO: 66 - protein, 362 aa, Homo sapiens
MLVMAPRTVLLLLSAALALTETWAGSHSMRYFYTSVSRPGRGEPRFISVGYVDDTQFVRFDSDAASPREEPRAPWIEQEGPEYWDRNTQIYKAQAQTDRESLRNLRGYYNQSEAGSHTLQSMYGCDVGPDGRLLRGHDQYAYDGKDYIALNEDLRSWTAADTAAQITQRKWEAAREAEQRRAYLEGECVEWLRRYLENGKDKLERADPPKTHVTHHPISDHEATLRCWALGFYPAEITLTWQRDGEDQTQDTELVETRPAGDRTFQKWAAVVVPSGEEQRYTCHVQHEGLPKPLTLRWEPSSQSTVPIVGIVAGLAVLAVVVIGAVVAAVMCRRKSSGGKGGSYSQAACSDSAQGSDVSLTA

SEQ ID NO: 67 - protein, 362 aa, Homo sapiens
MRVTAPRTLLLLLWGAVALTETWAGSHSMRYFYTAMSRPGRGEPRFITVGYVDDTLFVRFDSDATSPRKEPRAPWIEQEGPEYWDRETQISKTNTQTYRENLRTALRYYNQSEAGSHIIQRMYGCDVGPDGRLLRGYDQDAYDGKDYIALNEDLSSWTAADTAAQITQRKWEAARVAEQDRAYLEGLCVESLRRYLENGKETLQRADPPKTHVTHHPISDHEVTLRCWALGFYPAEITLTWQRDGEDQTQDTELVETRPAGDRTFQKWAAVVVPSGEEQRYTCHVQHEGLPKPLTLRWEPSSQSTVPIVGIVAGLAVLAVVVIGAVVAAVMCRRKSSGGKGGSYSQAACSDSAQGSDVSLTA

SEQ ID NO: 68 - protein, 362 aa, Homo sapiens
MRVTAPRTVLLLLSGALALTETWAGSHSMRYFYTAMSRPGRGEPRFIAVGYVDDTQFVRFDSDAASPRMAPRAPWIEQEGPEYWDRETQISKTNTQTYRESLRNLRGYYNQSEAGSHTLQRMYGCDVGPDGRLLRGHDQSAYDGKDYIALNEDLSSWTAADTAAQITQRKWEAAREAEQWRAYLEGLCVEWLRRYLENGKETLQRADPPKTHVTHHPISDHEATLRCWALGFYPAEITLTWQRDGEDQTQDTELVETRPAGDRTFQKWAAVVVPSGEEQRYTCHVQHEGLPKPLTLRWEPSSQSTIPIVGIVAGLAVLAVVVIGAVVATVMCRRKSSGGKGGSYSQAASSDSAQGSDVSLTA

SEQ ID NO: 69 - protein, 362 aa, Homo sapiens [sequence omitted]

SEQ ID NO: 70 - protein, 362 aa, Homo sapiens
MRVTAPRTLLLLLWGAVALTETWAGSHSMRYFYTAMSRPGRGEPRFITVGYVDDTLFVRFDSDATSPRKEPRAPWIEQEGPEYWDRETQISKTNTQTYRENLRTALRYYNQSEAGSHIIQRMYGCDVGPDGRLLRGYDQDAYDGKDYIALNEDLSSWTAADTAAQITQRKWEAARVAEQLRAYLEGLCVESLRRYLENGKETLQRADPPKTHVTHHPISDHEVTLRCWALGFYPAEITLTWQRDGEDQTQDTELVETRPAGDRTFQKWAAVVVPSGEEQRYTCHVQHEGLPKPLTLRWEPSSQSTVPIVGIVAGLAVLAVVVIGAVVAAVMCRRKSSGGKGGSYSQAACSDSAQGSDVSLTA

SEQ ID NO: 71 - protein, 362 aa, Homo sapiens [sequence omitted]

SEQ ID NO: 72 - protein, 362 aa, Homo sapiens [sequence omitted]

SEQ ID NO: 73 - protein, 362 aa, Homo sapiens [sequence omitted]

SEQ ID NO: 74 - protein, 362 aa, Homo sapiens [sequence omitted]

SEQ ID NO: 75 - protein, 362 aa, Homo sapiens
MRVTAPRTLLLLLWGAVALTETWAGSHSMRYFHTSVSRPGRGEPRFISVGYVDGTQFVRFDSDAASPRTEPRAPWIEQEGPEYWDRNTQISKTNTQTYRESLRNLRGYYNQSEAGSHTLQRMYGCDVGPDGRLLRGHDQSAYDGKDYIALNEDLSSWTAADTAAQITQRKWEAARVAEQLRAYLEGTCVEWLRRHLENGKETLQRADPPKTHVTHHPISDHEATLRCWALGFYPAEITLTWQRDGEDQTQDTELVETRPAGDRTFQKWAAVVVPSGEEQRYTCHVQHEGLPKPLTLRWEPSSQSTIPIVGIVAGLAVLAVVVIGAVVATVMCRRKSSGGKGGSYSQAASSDSAQGSDVSLTA

SEQ ID NO: 76 - protein, 362 aa, Homo sapiens
MLVMAPRTVLLLLSAALALTETWAGSHSMRYFYTAVSRPGRGEPRFISVGYVDDTQFVRFDSDAASPREEPRAPWIEQEGPEYWDRNTQICKTNTQTDRESLRNLRGYYNQSEAGSHTLQWMYGCDVGPDGRLLRGYNQFAYDGKDYIALNEDLSSWTAADTAAQITQRKWEAAREAEQLRAYLEGTCVEWLRRHLENGKETLQRADPPKTHVTHHPISDHEATLRCWALGFYPAEITLTWQRDGEDQTQDTELVETRPAGDRTFQKWAAVVVPSGEEQRYTCHVQHEGLPKPLTLRWEPSSQSTVPIVGIVAGLAVLAVVVIGAVVAAVMCRRKSSGGKGGSYSQAASSDSAQGSDVSLTA

SEQ ID NO: 77 - protein, 362 aa, Homo sapiens
MRVTAPRTLLLLLWGAVALTETWAGSHSMRYFYTAMSRPGRGEPRFITVGYVDDTQFVRFDSDATSPRMAPRAPWIEQEGPEYWDRETQISKTNTQTYRENLRTALRYYNQSEAGSHTWQTMYGCDLGPDGRLLRGHNQLAYDGKDYIALNEDLSSWTAADTAAQITQLKWEAARVAEQLRAYLEGECVEWLRRYLENGKETLQRADPPKTHVTHHPISDHEATLRCWALGFYPAEITLTWQRDGEDQTQDTELVETRPAGDRTFQKWAAVVVPSGEEQRYTCHVQHEGLPKPLTLRWEPSSQSTVPIVGIVAGLAVLAVVVIGAVVAAVMCRRKSSGGKGGSYSQAACSDSAQGSDVSLTA

SEQ ID NO: 78 - protein, 362 aa, Homo sapiens [sequence omitted]

SEQ ID NO: 79 - protein, 362 aa, Homo sapiens [sequence omitted]

SEQ ID NO: 80 - protein, 362 aa, Homo sapiens [sequence omitted]

SEQ ID NO: 81 - protein, 362 aa, Homo sapiens [sequence omitted]

SEQ ID NO: 82 - protein, 362 aa, Homo sapiens [sequence omitted]

SEQ ID NO: 83 - protein, 362 aa, Homo sapiens [sequence omitted]

SEQ ID NO: 84 - protein, 362 aa, Homo sapiens [sequence omitted]

SEQ ID NO: 85 - protein, 362 aa, Homo sapiens [sequence omitted]

SEQ ID NO: 86 - protein, 266 aa, Homo sapiens
MVCLKLPGGSCMAALTVTLMVLSSPLALAGDTQPRFLWQGKYKCHFFNGTERVQFLERLFYNQEEFVRFDSDVGEYRAVTELGRPVAESWNSQKDILEDRRGQVDTVCRHNYGVGESFTVQRRVHPEVTVYPAKTQPLQHHNLLVCSVSGFYPGSIEVRWFRNGQEEKAGVVSTGLIQNGDWTFQTLVMLETVPRSGEVYTCQVEHPSVMSPLTVEWRARSESAQSKMLSGVGGFVLGLLFLGAGLFIYFRNQKGHSGLQPTGFLS

SEQ ID NO: 87 - protein, 266 aa, Homo sapiens
MVCLRLPGGSCMAVLTVTLMVLSSPLALAGDTRPRFLEYSTSECHFFNGTERVRYLDRYFHNQEENVRFDSDVGEFRAVTELGRPDAEYWNSQKDLLEQKRGRVDNYCRHNYGVVESFTVQRRVHPKVTVYPSKTQPLQHHNLLVCSVSGFYPGSIEVRWFRNGQEEKTGVVSTGLIHNGDWTFQTLVMLETVPRSGEVYTCQVEHPSVTSPLTVEWRARSESAQSKMLSGVGGFVLGLLFLGAGLFIYFRNQKGHSGLQPRGFLS

SEQ ID NO: 88 - protein, 266 aa, Homo sapiens
MVCLKLPGGSCMTALTVTLMVLSSPLALSGDTRPRFLWQPKRECHFFNGTERVRFLDRYFYNQEESVRFDSDVGEFRAVTELGRPDAEYWNSQKDILEQARAAVDTYCRHNYGVVESFTVQRRVQPKVTVYPSKTQPLQHHNLLVCSVSGFYPGSIEVRWFLNGQEEKAGMVSTGLIQNGDWTFQTLVMLETVPRSGEVYTCQVEHPSVTSPLTVEWRARSESAQSKMLSGVGGFVLGLLFLGAGLFIYFRNQKGHSGLQPTGFLS

SEQ ID NO: 89 - protein, 266 aa, Homo sapiens [sequence omitted]

SEQ ID NO: 90 - protein, 266 aa, Homo sapiens
MVCLKLPGGSCMTALTVTLMVLSSPLALAGDTRPRFLWQLKFECHFFNGTERVRLLERCIYNQEESVRFDSDVGEYRAVTELGRPDAEYWNSQKDLLEQRRAAVDTYCRHNYGVGESFTVQRRVEPKVTVYPSKTQPLQHHNLLVCSVSGFYPGSIEVRWFRNGQEEKAGVVSTGLIQNGDWTFQTLVMLETVPRSGEVYTCQVEHPSVTSPLTVEWRARSESAQSKMLSGVGGFVLGLLFLGAGLFIYFRNQKGHSGLQPTGFLS

SEQ ID NO: 91 - protein, 266 aa, Homo sapiens [sequence omitted]

SEQ ID NO: 92 - protein, 266 aa, Homo sapiens [sequence omitted]

SEQ ID NO: 93 - protein, 266 aa, Homo sapiens [sequence omitted]

SEQ ID NO: 94 - protein, 266 aa, Homo sapiens [sequence omitted]

SEQ ID NO: 95 - protein, 266 aa, Homo sapiens [sequence omitted]

SEQ ID NO: 96 - protein, 266 aa, Homo sapiens [sequence omitted]

SEQ ID NO: 97 - protein, 266 aa, Homo sapiens [sequence omitted]

SEQ ID NO: 98 - protein, 266 aa, Homo sapiens [sequence omitted]

SEQ ID NO: 99 - protein, 266 aa, Homo sapiens [sequence omitted]

SEQ ID NO: 100 - protein, 266 aa, Homo sapiens [sequence omitted]

SEQ ID NO: 101 - protein, 266 aa, Homo sapiens [sequence omitted]

SEQ ID NO: 102 - protein, 254 aa, Homo sapiens
MILNKALMLGALALTTVMSPCGGEDIVADHVASYGVNLYQSYGPSGQYTHEFDGDEQFYVDLGRKETVWCLPVLRQFRFDPQFALTNIAVLKHNLNSLIKRSNSTAATNEVPEVTVFSKSPVTLGQPNILICLVDNIFPPVVNITWLSNGHSVTEGVSETSFLSKSDHSFFKISYLTLLPSAEESYDCKVEHWGLDKPLLKHWEPEIPAPMSELTETVVCALGLSVGLVGIVVGTVFIIRGLRSVGASRHQGPL

SEQ ID NO: 103 - protein, 255 aa, Homo sapiens
MILNKALMLGALALTTVMSPCGGEDIVADHVASYGVNLYQSYGPSGQYSHEFDGDEEFYVDLERKETVWQLPLFRRFRRFDPQFALTNIAVLKHNLNIVIKRSNSTAATNEVPEVTVFSKSPVTLGQPNTLICLVDNIFPPVVNITWLSNGHSVTEGVSETSFLSKSDHSFFKISYLTFLPSADEIYDCKVEHWGLDEPLLKHWEPEIPTPMSELTETVVCALGLSVGLVGIVVGTVLIIRGLRSVGASRHQGPL

SEQ ID NO: 104 - protein, 255 aa, Homo sapiens
MILNKALLLGALALTTVMSPCGGEDIVADHVASCGVNLYQFYGPSGQYTHEFDGDEQFYVDLERKETAWRWPEFSKFGGFDPQGALRNMAVAKHNLNIMIKRYNSTAATNEVPEVTVFSKSPVTLGQPNTLICLVDNIFPPVVNITWLSNGQSVTEGVSETSFLSKSDHSFFKISYLTFLPSADEIYDCKVEHWGLDQPLLKHWEPEIPAPMSELTETVVCALGLSVGLMGIVVGTVFIIQGLRSVGASRHQGPL

SEQ ID NO: 105 - protein, 254 aa, Homo sapiens
MILNKALMLGALALTTVMSPCGGEDIVADHVASYGVNLYQSYGPSGQFTHEFDGDEEFYVDLERKETVWKLPLFHRLRFDPQFALTNIAVLKHNLNILIKRSNSTAATNEVPEVTVFSKSPVTLGQPNTLICLVDNIFPPVVNITWLSNGHSVTEGVSETSFLSKSDHSFFKISYLTFLPSADEIYDCKVEHWGLDEPLLKHWEPEIPAPMSELTETVVCALGLSVGLVGIVVGTVLIIRGLRSVGASRHQGPL

SEQ ID NO: 106 - protein, 255 aa, Homo sapiens [sequence omitted]

SEQ ID NO: 107 - protein, 255 aa, Homo sapiens [sequence omitted]

SEQ ID NO: 108 - protein, 254 aa, Homo sapiens
MILNKALLLGALALTTVMSPCGGEDIVADHVASYGVNLYQSYGPSGQYTHEFDGDEQFYVDLGRKETVWCLPVLRQFRFDPQFALTNIAVTKHNLNILIKRSNSTAATNEVPEVTVFSKSPVTLGQPNTLICLVDNIFPPVVNITWLSNGHSVTEGVSETSFLSKSDHSFFKISYLTFLPSADEIYDCKVEHWGLDEPLLKHWEPEIPAPMSELTETVVCALGLSVGLVGIVVGTVFIIRGLRSVGASRHQGPL

SEQ ID NO: 109 - protein, 261 aa, Homo sapiens
MSWKKALRIPGGLRAATVTLMLAMLSTPVAEGRDSPEDFVYQFKAMCYFTNGTERVRYVTRYIYNREEYARFDSDVEVYRAVTPLGPPDAEYWNSQKEVLERTRAELDTVCRHNYQLELRTTLQRRVEPTVTISPSRTEALNHHNLLVCSVTDFYPAQIKVRWFRNDQEETTGVVSTPLIRNGDWTFQILVMLEMTPQHGDVYTCHVEHPSLQNPITVEWRAQSESAQSKMLSGIGGFVLGLIFLGLGLIIHHRSQKGLLH

SEQ ID NO: 110 - protein, 261 aa, Homo sapiens
MSWKKALRIPGGLRAATVTLMLSMLSTPVAEGRDSPEDFVYQFKGMCYFTNGTERVRLVSRSIYNREEIVRFDSDVGEFRAVTLLGLPAAEYWNSQKDILERKRAAVDRVCRHNYQLELRTTLQRRVEPTVTISPSRTEALNHHNLLVCSVTDFYPAQIKVRWFRNDQEETAGVVSTPLIRNGDWTFQILVMLEMTPQRGDVYTCHVEHPSLQSPITVEWRAQSESAQSKMLSGIGGFVLGLIFLGLGLIIHHRSQKGLLH

SEQ ID NO: 111 - protein, 261 aa, Homo sapiens
MSWKKALRIPGDLRVATVTLMLAMLSSLLAEGRDSPEDFVFQFKGMCYFTNGTERVRLVTRYIYNREEYARFDSDVGVYRAVTPQGRPDAEYWNSQKEVLEGTRAELDTVCRHNYEVAFRGILQRRVEPTVTISPSRTEALNHHNLLVCSVTDFYPGQIKVRWFRNDQEETAGVVSTPLIRNGDWTFQILVMLEMTPQRGDVYTCHVEHPSLQSPITVEWRAQSESAQSKMLSGVGGFVLGLIFLGLGLIIRQRSQKGLLH

SEQ ID NO: 112 - protein, 261 aa, Homo sapiens [sequence omitted]

SEQ ID NO: 113 - protein, 261 aa, Homo sapiens
MSWKKALRIPGGLRAATVTLMLSMLSTPVAEGRDSPEDFVYQFKGMCYFTNGTERVRLVSRSIYNREEIVRFDSDVGEFRAVTLLGLPAAEYWNSQKDILERKRAAVDRVCRHNYQLELRTTLQRRVEPTVTISPSRTEALNHHNLLVCSVTDFYPAQIKVRWFRNGQEETAGVVSTPLIRNGDWTFQILVMLEMTPQRGDVYTCHVEHPSLQSPITVEWRAQSESAQSKMLSGIGGFVLGLIFLGLGLIIHHRSQKGLLH

SEQ ID NO: 114 - protein, 261 aa, Homo sapiens [sequence omitted]

SEQ ID NO: 115 - protein, 261 aa, Homo sapiens [sequence omitted]

SEQ ID NO: 116 - protein, 261 aa, Homo sapiens [sequence omitted]

SEQ ID NO: 117 - protein, 261 aa, Homo sapiens [sequence omitted]

SEQ ID NO: 118 - protein, 269 aa, Homo sapiens [sequence omitted]

SEQ ID NO: 119 - protein, 261 aa, Homo sapiens [sequence omitted]

SEQ ID NO: 120 - protein, 260 aa, Homo sapiens
MRPEDRMFHIRAVILRALSLAFLLSLRGAGAIKADHVSTYAAFVQTHRPTGEFMFEFDEDEMFYVDLDKKETVWHLEEFGQAFSFEAQGGLANIAILNNNLNTLIQRSNHTQATNDPPEVTVFPKEPVELGQPNTLICHIDKFFPPVLNVTWLCNGELVTEGVAESLFLPRTDYSFHKFHYLTFVPSAEDFYDCRVEHWGLDQPLLKHWEAQEPIQMPETTETVLCALGLVLGLVGIIVGTVLIIKSLRSGHDPRAQGTL

SEQ ID NO: 121 - protein, 260 aa, Homo sapiens [sequence omitted]

SEQ ID NO: 122 - protein, 260 aa, Homo sapiens [sequence omitted]

SEQ ID NO: 123 - protein, 258 aa, Homo sapiens
MMVLQVSAAPRTVALTALLMVLLTSVVQGRATPENYLFQGRQECYAFNGTQRFLERYIYNREEFARFDSDVGEFRAVTELGRPAAEYWNSQKDILEEKRAVPDRMCRHNYELGGPMTLQRRVQPRVNVSPSKKGPLQHHNLLVCHVTDFYPGSIQVRWFLNGQEETAGVVSTNLIRNGDWTFQILVMLEMTPQQGDVYTCQVEHTSLDSPVTVEWKAQSDSARSKTLTGAGGFVLGLIICGVGIFMHRRSKKVQRGSA

SEQ ID NO: 124 - protein, 258 aa, Homo sapiens
MMVLQVSAAPRTVALTALLMVLLTSVVQGRATPENYLFQGRQECYAFNGTQRFLERYIYNREEFVRFDSDVGEFRAVTELGRPDEEYWNSQKDILEEERAVPDRMCRHNYELGGPMTLQRRVQPRVNVSPSKKGPLQHHNLLVCHVTDFYPGSIQVRWFLNGQEETAGVVSTNLIRNGDWTFQILVMLEMTPQQGDVYTCQVEHTSLDSPVTVEWKAQSDSARSKTLTGAGGFVLGLIICGVGIFMHRRSKKVQRGSA

SEQ ID NO: 125 - protein, 258 aa, Homo sapiens
MMVLQVSAAPRTVALTALLMVLLTSVVQGRATPENYLFQGRQECYAFNGTQRFLERYIYNREEFVRFDSDVGEFRAVTELGRPDEEYWNSQKDILEEKRAVPDRMCRHNYELGGPMTLQRRVQPRVNVSPSKKGPLQHHNLLVCHVTDFYPGSIQVRWFLNGQEETAGVVSTNLIRNGDWTFQILVMLEMTPQQGDVYTCQVEHTSMDSPVTVEWKAQSDSARSKTLTGAGGFVLGLIICGVGIFMHRRSKKVQRGSA

SEQ ID NO: 126 - protein, 258 aa, Homo sapiens
MMVLQVSAAPRTVALTALLMVLLTSVVQGRATPENYVYQLRQECYAFNGTQRFLERYIYNREEFVRFDSDVGEFRAVTELGRPDEDYWNSQKDLLEEKRAVPDRVCRHNYELDEAVTLQRRVQPKVNVSPSKKGPLQHHNLLVCHVTDFYPGSIQVRWFLNGQEETAGVVSTNLIRNGDWTFQILVMLEMTPQQGDVYICQVEHTSLDSPVTVEWKAQSDSARSKTLTGAGGFVLGLIICGVGIFMHRRSKKVQRGSA

SEQ ID NO: 127 - protein, 258 aa, Homo sapiens [sequence omitted]

SEQ ID NO: 128 - protein, 258 aa, Homo sapiens [sequence omitted]

SEQ ID NO: 129 - protein, 258 aa, Homo sapiens [sequence omitted]

SEQ ID NO: 130 - protein, 258 aa, Homo sapiens [sequence omitted]

SEQ ID NO: 131 - protein, 258 aa, Homo sapiens [sequence omitted]

SEQ ID NO: 132 - protein, 258 aa, Homo sapiens [sequence omitted]

SEQ ID NO: 133 - protein, 258 aa, Homo sapiens [sequence omitted]

SEQ ID NO: 134 - protein, 258 aa, Homo sapiens [sequence omitted]

SEQ ID NO: 135 - protein, 342 aa, Homo sapiens
CSHSMRYFYTAVSRPGRGEPRFIAVGYVDDTQFVRFDSDAASPRGEPRAPWVEQEGPEYWDRETQKYKRQAQADRVSLRNLRGYYNQSEAGSHTLQRMYGCDLGPDGRLLRGYDQSAYDGKDYIALNEDLRSWTAADTAAQITQRKWEAAREAEQWRAYLEGTCVEWLRRYLENGKETLQRAEHPKTHVTHHPVSDHEATLRCWALGFYPAEITLTWQRDGEDQTQDTELVETRPAGDGTFQKWAAVVVPSGEEQRYTCHVQHEGLPEPLTLRWEPSSQPTIPIVGIVAGLAVLAVLAVLGAVMAVVMCRRKSSGGKGGSCSQAASSNSAQGSDESLIACKA

SEQ ID NO: 136 - protein, 337 aa, Homo sapiens
GSHSLKYFHTSVSRPGRGEPRFISVGYVDDTQFVRFDNDAASPRMVPRAPWMEQEGSEYWDRETRSARDTAQIFRVNLRTLRGYYNQSEAGSHTLQWMHGCELGPDGRFLRGYEQFAYDGKDYLTLNEDLRSWTAVDTAAQISEQKSNDASEAEHQRAYLEDTCVEWLHKYLEKGKETLLHLEPPKTHVTHHPISDHEATLRCWALGFYPAEITLTWQQDGEGHTQDTELVETRPAGDGTFQKWAAVVVPSGEEQRYTCHVQHEGLPEPVTLRWKPASQPTIPIVGIIAGLVLLGSVVSGAVVAAVIWRKKSSGGKGGSYSKAEWSDSAQGSESHSL

SEQ ID NO: 137 - protein, 314 aa, Homo sapiens
GSHSMRYFSAAVSRPGRGEPRFIAMGYVDDTQFVRFDSDSACPRMEPRAPWVEQEGPEYWEEETRNTKAHAQTDRMNLQTLRGYYNQSEASSHTLQWMIGCDLGSDGRLLRGYEQYAYDGKDYLALNEDLRSWTAADTAAQISKRKCEAANVAEQRRAYLEGTCVEWLHRYLENGKEMLQRADPPKTHVTHHPVFDYEATLRCWALGFYPAEIILTWQRDGEDQTQDVELVETRPAGDGTFQKWAAVVVPSGEEQRYTCHVQHEGLPEPLMLRWKQSSLPTIPIMGIVAGLVVLAAVVTGAAVAAVLWRKKSSD

SEQ ID NO: 138 - protein, 9 aa, Artificial Sequence
  Description of Artificial Sequence: Synthetic peptide
ILKEPVHGV

SEQ ID NO: 139 - protein, 9 aa, Artificial Sequence
  Description of Artificial Sequence: Synthetic peptide
IAKEPVHGV

SEQ ID NO: 140 - protein, 9 aa, Artificial Sequence
  Description of Artificial Sequence: Synthetic peptide
ILKEPVHGA

SEQ ID NO: 141 - protein, 9 aa, Artificial Sequence
  Description of Artificial Sequence: Synthetic peptide
IAKEPVHGA

SEQ ID NO: 142 - protein, 9 aa, Artificial Sequence
  Description of Artificial Sequence: Synthetic peptide
GLKEPQIQV

SEQ ID NO: 143 - protein, 9 aa, Artificial Sequence
  Description of Artificial Sequence: Synthetic peptide
NLVPMVATA

SEQ ID NO: 144 - protein, 9 aa, Artificial Sequence
  Description of Artificial Sequence: Synthetic peptide
IRAAPPPLA

SEQ ID NO: 145 - protein, 9 aa, Artificial Sequence
  Description of Artificial Sequence: Synthetic peptide
RPPIFIRRL

SEQ ID NO: 146 - protein, 9 aa, Artificial Sequence
  Description of Artificial Sequence: Synthetic peptide
RLRAEAQVK

SEQ ID NO: 147 - protein, 9 aa, Artificial Sequence
  Description of Artificial Sequence: Synthetic peptide
IVTDFSVIK

SEQ ID NO: 148 - protein, 9 aa, Artificial Sequence
  Description of Artificial Sequence: Synthetic peptide
EGGVGWRHW

SEQ ID NO: 149 - protein, 9 aa, Artificial Sequence
  Description of Artificial Sequence: Synthetic peptide
QPRAPIRPI

SEQ ID NO: 150 - protein, 9 aa, Artificial Sequence
  Description of Artificial Sequence: Synthetic peptide
FRLGRAYGL

SEQ ID NO: 151 - protein, 9 aa, Artificial Sequence
  Description of Artificial Sequence: Synthetic peptide
YPLHEQHGM

SEQ ID NO: 152 - protein, 9 aa, Artificial Sequence
  Description of Artificial Sequence: Synthetic peptide
CLGGLLTMV

SEQ ID NO: 153 - protein, 9 aa, Artificial Sequence
  Description of Artificial Sequence: Synthetic peptide
GLCTLVAML

SEQ ID NO: 154 - protein, 8 aa, Artificial Sequence
  Description of Artificial Sequence: Synthetic peptide
RAKFKQLL

SEQ ID NO: 155 - protein, 9 aa, Artificial Sequence
  Description of Artificial Sequence: Synthetic peptide
NLVPMVATV

SEQ ID NO: 156 - protein, 11 aa, Artificial Sequence
  Description of Artificial Sequence: Synthetic peptide
FIAGNSAYEYV

SEQ ID NO: 157 - protein, 12 aa, Artificial Sequence
  Description of Artificial Sequence: Synthetic peptide
SDEEEAIVAYTL

SEQ ID NO: 158 - protein, 9 aa, Artificial Sequence
  Description of Artificial Sequence: Synthetic peptide
ITDQVPFSV

SEQ ID NO: 159 - protein, 9 aa, Artificial Sequence
  Description of Artificial Sequence: Synthetic peptide
YMDGTMSQV

SEQ ID NO: 160 - protein, 10 aa, Artificial Sequence
  Description of Artificial Sequence: Synthetic peptide
EAAGIGILTV

SEQ ID NO: 161 - protein, 9 aa, Artificial Sequence
  Description of Artificial Sequence: Synthetic peptide
AELVHFLLL

SEQ ID NO: 162 - protein, 9 aa, Artificial Sequence
  Description of Artificial Sequence: Synthetic peptide
FLWGPRALV

SEQ ID NO: 163 - protein, 9 aa, Artificial Sequence
  Description of Artificial Sequence: Synthetic peptide
GLYDGMEHL

SEQ ID NO: 164 - protein, 9 aa, Artificial Sequence
  Description of Artificial Sequence: Synthetic peptide
ALKDVEERV

SEQ ID NO: 165 - protein, 9 aa, Artificial Sequence
  Description of Artificial Sequence: Synthetic peptide
ASSTLYLVF

SEQ ID NO: 166 - protein, 9 aa, Artificial Sequence
  Description of Artificial Sequence: Synthetic peptide
LLGLALIEV

SEQ ID NO: 167 - protein, 9 aa, Artificial Sequence
  Description of Artificial Sequence: Synthetic peptide
SLLMWITQC

SEQ ID NO: 168 - protein, 10 aa, Artificial Sequence
  Description of Artificial Sequence: Synthetic peptide
YMLDLQPETT

SEQ ID NO: 169 - protein, 9 aa, Artificial Sequence
  Description of Artificial Sequence: Synthetic peptide
FLDEFMEGV

SEQ ID NO: 170 - protein, 9 aa, Artificial Sequence
  Description of Artificial Sequence: Synthetic peptide
VVMSWAPPV

SEQ ID NO: 171 - protein, 10 aa, Artificial Sequence
  Description of Artificial Sequence: Synthetic peptide
LLLDDLLVSI

SEQ ID NO: 172 - protein, 10 aa, Artificial Sequence
  Description of Artificial Sequence: Synthetic peptide
SLADEAEVYL

SEQ ID NO: 173 - protein, 9 aa, Artificial Sequence
  Description of Artificial Sequence: Synthetic peptide
VLHDDLLEA

SEQ ID NO: 174 - protein, 10 aa, Artificial Sequence
  Description of Artificial Sequence: Synthetic peptide
GIVEGLITTV

SEQ ID NO: 175 - protein, 10 aa, Artificial Sequence
  Description of Artificial Sequence: Synthetic peptide
SLFEGIDIVT

SEQ ID NO: 176 - protein, 10 aa, Artificial Sequence
  Description of Artificial Sequence: Synthetic peptide
FIASNGVKLV

SEQ ID NO: 177 - protein, 9 aa, Artificial Sequence
  Description of Artificial Sequence: Synthetic peptide
ILNAMIAKI

SEQ ID NO: 178 - protein, 10 aa, Artificial Sequence
  Description of Artificial Sequence: Synthetic peptide
GLFGDIYLAI

SEQ ID NO: 179 - protein, 9 aa, Artificial Sequence
  Description of Artificial Sequence: Synthetic peptide
ILDKVLVHL

SEQ ID NO: 180 - protein, 10 aa, Artificial Sequence
  Description of Artificial Sequence: Synthetic peptide
ACDPHSGHFV

SEQ ID NO: 181 - protein, 9 aa, Artificial Sequence
  Description of Artificial Sequence: Synthetic peptide
FMPDFDLHL

SEQ ID NO: 182 - protein, 9 aa, Artificial Sequence
  Description of Artificial Sequence: Synthetic peptide
TLWCSPIKV

SEQ ID NO: 183 - protein, 10 aa, Artificial Sequence
  Description of Artificial Sequence: Synthetic peptide
VLLGVKLFGV

SEQ ID NO: 184 - protein, 9 aa, Artificial Sequence
  Description of Artificial Sequence: Synthetic peptide
ALIHHNTYL

SEQ ID NO: 185 - protein, 10 aa, Artificial Sequence
  Description of Artificial Sequence: Synthetic peptide
VLENFTIFLV

SEQ ID NO: 186 - protein, 10 aa, Artificial Sequence
  Description of Artificial Sequence: Synthetic peptide
SVLENFTIFL

SEQ ID NO: 187 - protein, 9 aa, Artificial Sequence
  Description of Artificial Sequence: Synthetic peptide
ILTGLNYEV

SEQ ID NO: 188 - protein, 9 aa, Artificial Sequence
  Description of Artificial Sequence: Synthetic peptide
ALYGFVPVL

SEQ ID NO: 189 - protein, 9 aa, Artificial Sequence
  Description of Artificial Sequence: Synthetic peptide
FLSDHLYLV

SEQ ID NO: 190 - protein, 9 aa, Artificial Sequence
  Description of Artificial Sequence: Synthetic peptide
HIAKSLFEV

SEQ ID NO: 191 - protein, 9 aa, Artificial Sequence
  Description of Artificial Sequence: Synthetic peptide
FLLDEAIGL

SEQ ID NO: 192 - protein, 9 aa, Artificial Sequence
  Description of Artificial Sequence: Synthetic peptide
VLAKKLKFV

SEQ ID NO: 193 - protein, 10 aa, Artificial Sequence
  Description of Artificial Sequence: Synthetic peptide
LLHTELERFL

SEQ ID NO: 194 - protein, 9 aa, Artificial Sequence
  Description of Artificial Sequence: Synthetic peptide
TLLSQVNKV

SEQ ID NO: 195 - protein, 11 aa, Artificial Sequence
  Description of Artificial Sequence: Synthetic peptide
FVEHDDESPGL

SEQ ID NO: 196 - protein, 9 aa, Artificial Sequence
  Description of Artificial Sequence: Synthetic peptide
YTDFHCQYV

SEQ ID NO: 197 - protein, 16 aa, Artificial Sequence
  Description of Artificial Sequence: Synthetic peptide
YSVYFNLPADTIYTNH

SEQ ID NO: 198 - protein, 9 aa, Artificial Sequence
  Description of Artificial Sequence: Synthetic peptide
FPSDSWCYF

SEQ ID NO: 199 - protein, 9 aa, Artificial Sequence
  Description of Artificial Sequence: Synthetic peptide
SYLDSGIHF

SEQ ID NO: 200 - protein, 13 aa, Artificial Sequence
  Description of Artificial Sequence: Synthetic peptide
FSWAMDLDPKGAE

SEQ ID NO: 201 - protein, 9 aa, Artificial Sequence
  Description of Artificial Sequence: Synthetic peptide
CILGKLFTK

SEQ ID NO: 202 - protein, 10 aa, Artificial Sequence
  Description of Artificial Sequence: Synthetic peptide
AVCPWTWLRG

SEQ ID NO: 203 - protein, 15 aa, Artificial Sequence
  Description of Artificial Sequence: Synthetic peptide
TLYQDDTLTLQAAGE

SEQ ID NO: 204 - protein, 9 aa, Artificial Sequence
  Description of Artificial Sequence: Synthetic peptide
GLFGDIYLA

SEQ ID NO: 205 - protein, 10 aa, Artificial Sequence
  Description of Artificial Sequence: Synthetic peptide
KILDAVVAQK

SEQ ID NO: 206 - protein, 9 aa, Artificial Sequence
  Description of Artificial Sequence: Synthetic peptide
ETVSEQSNV

SEQ ID NO: 207 - protein, 14 aa, Artificial Sequence
  Description of Artificial Sequence: Synthetic peptide
MIFEKHGFRRTTPP

SEQ ID NO: 208 - protein, 10 aa, Artificial Sequence
  Description of Artificial Sequence: Synthetic peptide
TLDWLLQTPK

SEQ ID NO: 209 - protein, 10 aa, Artificial Sequence
  Description of Artificial Sequence: Synthetic peptide
  MOD_RES (10)..(10): Ile or Leu
ILNAMIAKIX

SEQ ID NO: 210 - protein, 8 aa, Artificial Sequence
  Description of Artificial Sequence: Synthetic peptide
CYMEAVAL

SEQ ID NO: 211 - protein, 9 aa, Artificial Sequence
  Description of Artificial Sequence: Synthetic peptide
WRRAPAPGA

SEQ ID NO: 212 - protein, 9 aa, Artificial Sequence
  Description of Artificial Sequence: Synthetic peptide
PVTWRRAPA

SEQ ID NO: 213 - protein, 12 aa, Artificial Sequence
  Description of Artificial Sequence: Synthetic peptide
CVEWLRIYLENG

SEQ ID NO: 214 - protein, 10 aa, Artificial Sequence
  Description of Artificial Sequence: Synthetic peptide
SLFEGIDIYT

SEQ ID NO: 215 - protein, 9 aa, Artificial Sequence
  Description of Artificial Sequence: Synthetic peptide
AEPINIQTW

SEQ ID NO: 216 - protein, 9 aa, Artificial Sequence
  Description of Artificial Sequence: Synthetic peptide
LMISRTPEV

SEQ ID NO: 217 - protein, 11 aa, Artificial Sequence
  Description of Artificial Sequence: Synthetic peptide
FLEGNEVGKTY

SEQ ID NO: 218 - protein, 9 aa, Artificial Sequence
  Description of Artificial Sequence: Synthetic peptide
KTLTSVFQK

SEQ ID NO: 219 - protein, 10 aa, Artificial Sequence
  Description of Artificial Sequence: Synthetic peptide
KLVVVGAVGV

SEQ ID NO: 220 - protein, 9 aa, Artificial Sequence
  Description of Artificial Sequence: Synthetic peptide
LVVVGAVGV

SEQ ID NO: 221 - protein, 9 aa, Artificial Sequence
  Description of Artificial Sequence: Synthetic peptide
VVVGAVGVG

SEQ ID NO: 222 - protein, 9 aa, Artificial Sequence
  Description of Artificial Sequence: Synthetic peptide
EEKLIVVLF

SEQ ID NO: 223 - protein, 11 aa, Artificial Sequence
  Description of Artificial Sequence: Synthetic peptide
SELFRSGLDSY

SEQ ID NO: 224 - protein, 9 aa, Artificial Sequence
  Description of Artificial Sequence: Synthetic peptide
FRSGLDSYV

SEQ ID NO: 225 - protein, 9 aa, Artificial Sequence
  Description of Artificial Sequence: Synthetic peptide
EAFIQPITR

SEQ ID NO: 226 - protein, 12 aa, Artificial Sequence
  Description of Artificial Sequence: Synthetic peptide
RVIKNSIRLTLE

SEQ ID NO: 227 - protein, 8 aa, Artificial Sequence
  Description of Artificial Sequence: Synthetic peptide
QQITKTEV

SEQ ID NO: 228 - protein, 9 aa, Artificial Sequence
  Description of Artificial Sequence: Synthetic peptide
KELEGILLL

SEQ ID NO: 229 - protein, 16 aa, Artificial Sequence
  Description of Artificial Sequence: Synthetic peptide
PYYFAAELPPRNLPEP

SEQ ID NO: 230 - protein, 10 aa, Artificial Sequence
  Description of Artificial Sequence: Synthetic peptide
ILDTAGREEY

SEQ ID NO: 231 - protein, 9 aa, Artificial Sequence
  Description of Artificial Sequence: Synthetic peptide
RPHVPESAF

SEQ ID NO: 232 - protein, 9 aa, Artificial Sequence
  Description of Artificial Sequence: Synthetic peptide
KIFSEVTLK

SEQ ID NO: 233 - protein, 9 aa, Artificial Sequence
  Description of Artificial Sequence: Synthetic peptide
SHETVIIEL

SEQ ID NO: 234 - protein, 15 aa, Artificial Sequence
  Description of Artificial Sequence: Synthetic peptide
GELIGILNAAKVPAD

SEQ ID NO: 235 - protein, 9 aa, Artificial Sequence
  Description of Artificial Sequence: Synthetic peptide
KINKNPKYK

SEQ ID NO: 236 - protein, 9 aa, Artificial Sequence
  Description of Artificial Sequence: Synthetic peptide
KLSEQESLL

SEQ ID NO: 237 - protein, 9 aa, Artificial Sequence
  Description of Artificial Sequence: Synthetic peptide
MLTNSCVKL

SEQ ID NO: 238 - protein, 9 aa, Artificial Sequence
  Description of Artificial Sequence: Synthetic peptide
FMVELVEGA

SEQ ID NO: 239 - protein, 9 aa, Artificial Sequence
  Description of Artificial Sequence: Synthetic peptide
GVRGRVEEI

SEQ ID NO: 240 - protein, 9 aa, Artificial Sequence
  Description of Artificial Sequence: Synthetic peptide
SSKALQRPV

SEQ ID NO: 241 - protein, 9 aa, Artificial Sequence
  Description of Artificial Sequence: Synthetic peptide
ATGFKQSSK

SEQ ID NO: 242 - protein, 11 aa, Artificial Sequence
  Description of Artificial Sequence: Synthetic peptide
HSATGFKQSSK

SEQ ID NO: 243 - protein, 9 aa, Artificial Sequence
  Description of Artificial Sequence: Synthetic peptide
KQSSKALQR

SEQ ID NO: 244 - protein, 9 aa, Artificial Sequence
  Description of Artificial Sequence: Synthetic peptide
GFKQSSKAL

SEQ ID NO: 245 - protein, 17 aa, Artificial Sequence
  Description of Artificial Sequence: Synthetic peptide
ATGFKQSSKALQRPVAS

SEQ ID NO: 246 - protein, 9 aa, Artificial Sequence
  Description of Artificial Sequence: Synthetic peptide
LATEKSRWS

SEQ ID NO: 247 - protein, 10 aa, Artificial Sequence
  Description of Artificial Sequence: Synthetic peptide
LATEKSRWSG

SEQ ID NO: 248 - protein, 9 aa, Artificial Sequence
  Description of Artificial Sequence: Synthetic peptide
FGLATEKSR

SEQ ID NO: 249 - protein, 9 aa, Artificial Sequence
  Description of Artificial Sequence: Synthetic peptide
GDFGLATEK

SEQ ID NO: 250 - protein, 29 aa, Artificial Sequence
  Description of Artificial Sequence: Synthetic peptide
EDLTVKIGDFGLATEKSRWSGSHQFEQLS

SEQ ID NO: 251 - protein, 9 aa, Artificial Sequence
  Description of Artificial Sequence: Synthetic peptide
FLIIWQNTM

SEQ ID NO: 252 - protein, 16 aa, Artificial Sequence
  Description of Artificial Sequence: Synthetic peptide
TMKQICKKEIRRLHQY

SEQ ID NO: 253 - protein, 10 aa, Artificial Sequence
  Description of Artificial Sequence: Synthetic peptide
RIAECILGMI

SEQ ID NO: 254 - protein, 15 aa, Artificial Sequence
  Description of Artificial Sequence: Synthetic peptide
IGRIAECILGMNPSR

SEQ ID NO: 255 - protein, 10 aa, Artificial Sequence
  Description of Artificial Sequence: Synthetic peptide
YVDFREYEYY

SEQ ID NO: 256 - protein, 11 aa, Artificial Sequence
  Description of Artificial Sequence: Synthetic peptide
SLYKFSPFPLG

SEQ ID NO: 257 - protein, 9 aa, Artificial Sequence
  Description of Artificial Sequence: Synthetic peptide
VVPCEPPEV

SEQ ID NO: 258 - protein, 25 aa, Artificial Sequence
  Description of Artificial Sequence: Synthetic peptide
NSNHVASGAGEAAIETQSSSSEEIV

SEQ ID NO: 259 - protein, 10 aa, Artificial Sequence
  Description of Artificial Sequence: Synthetic peptide
SPANSIRHNL

SEQ ID NO: 260 - protein, 10 aa, Artificial Sequence
  Description of Artificial Sequence: Synthetic peptide
SPQNSIRHNL

SEQ ID NO: 261 - protein, 9 aa, Artificial Sequence
  Description of Artificial Sequence: Synthetic peptide
AMAPIKVRL

SEQ ID NO: 262 - protein, 9 aa, Artificial Sequence
  Description of Artificial Sequence: Synthetic peptide
GYDQIMPKK

SEQ ID NO: 263 - protein, 9 aa, Artificial Sequence
  Description of Artificial Sequence: Synthetic peptide
GYDQIMPKI

SEQ ID NO: 264 - protein, 10 aa, Artificial Sequence
  Description of Artificial Sequence: Synthetic peptide
QRPYGYDQIM

SEQ ID NO: 265 - protein, 9 aa, Artificial Sequence
  Description of Artificial Sequence: Synthetic peptide
LEEKKGNYV

SEQ ID NO: 266 - protein, 10 aa, Artificial Sequence
  Description of Artificial Sequence: Synthetic peptide
RLSSCVPVAG

SEQ ID NO: 267 - protein, 9 aa, Artificial Sequence
  Description of Artificial Sequence: Synthetic peptide
AARAVFLAL

SEQ ID NO: 268 - protein, 15 aa, Artificial Sequence
  Description of Artificial Sequence: Synthetic peptide
KPLFRRMSSLELVIA

SEQ ID NO: 269 - protein, 9 aa, Artificial Sequence
  Description of Artificial Sequence: Synthetic peptide
FLDRFLSCM

SEQ ID NO: 270 - protein, 11 aa, Artificial Sequence
  Description of Artificial Sequence: Synthetic peptide
SLIAAAAFCLA

SEQ ID NO: 271 - protein, 8 aa, Artificial Sequence
  Description of Artificial Sequence: Synthetic peptide
YRPRPRRY

SEQ ID NO: 272 - protein, 9 aa, Artificial Sequence
  Description of Artificial Sequence: Synthetic peptide
YYWPRPRRY

SEQ ID NO: 273 - protein, 10 aa, Artificial Sequence
  Description of Artificial Sequence: Synthetic peptide
VLPDVFIRCV

SEQ ID NO: 274 - protein, 9 aa, Artificial Sequence
  Description of Artificial Sequence: Synthetic peptide
FLAELAYDL

SEQ ID NO: 275 - protein, 10 aa, Artificial Sequence
  Description of Artificial Sequence: Synthetic peptide
ATFLGSLTWK

SEQ ID NO: 276 - protein, 9 aa, Artificial Sequence
  Description of Artificial Sequence: Synthetic peptide
MLAVISCAV

SEQ ID NO: 277 - protein, 9 aa, Artificial Sequence
  Description of Artificial Sequence: Synthetic peptide
RQKRILVNL

SEQ ID NO: 278 - protein, 9 aa, Artificial Sequence
  Description of Artificial Sequence: Synthetic peptide
NYNNFYRFL

SEQ ID NO: 279 - protein, 10 aa, Artificial Sequence
  Description of Artificial Sequence: Synthetic peptide
EYSKECLKEF

SEQ ID NO: 280 - protein, 9 aa, Artificial Sequence
  Description of Artificial Sequence: Synthetic peptide
EYLSLSDKI

SEQ ID NO: 281 - protein, 11 aa, Artificial Sequence
  Description of Artificial Sequence: Synthetic peptide
MLMAQEALAFL

SEQ ID NO: 282 - protein, 10 aa, Artificial Sequence
  Description of Artificial Sequence: Synthetic peptide
LAAQERRVPR

SEQ ID NO: 283 - protein, 9 aa, Artificial Sequence
  Description of Artificial Sequence: Synthetic peptide
ELVRRILSR

SEQ ID NO: 284 - protein, 9 aa, Artificial Sequence
  Description of Artificial Sequence: Synthetic peptide
APRGVRMAV

SEQ ID NO: 285 - protein, 14 aa, Artificial Sequence
  Description of Artificial Sequence: Synthetic peptide
SLLMWITQCFLPVF

SEQ ID NO: 286 - protein, 20 aa, Artificial Sequence
  Description of Artificial Sequence: Synthetic peptide
QGAMLAAQERRVPRAAEVPR

SEQ ID NO: 287 - protein, 18 aa, Artificial Sequence
  Description of Artificial Sequence: Synthetic peptide
AADHRQLQLSISSCLQQL

SEQ ID NO: 288 - protein, 22 aa, Artificial Sequence
  Description of Artificial Sequence: Synthetic peptide
CLSRRPWKRSWSAGSCPGMPHL

SEQ ID NO: 289 - protein, 13 aa, Artificial Sequence
  Description of Artificial Sequence: Synthetic peptide
ILSRDAAPLPRPG

SEQ ID NO: 290 - protein, 14 aa, Artificial Sequence
  Description of Artificial Sequence: Synthetic peptide
AGATGGRGPRGAGA

SEQ ID NO: 291 - protein, 10 aa, Artificial Sequence
  Description of Artificial Sequence: Synthetic peptide
RYCNLEGPPI

SEQ ID NO: 292 - protein, 24 aa, Artificial Sequence
  Description of Artificial Sequence: Synthetic peptide
KWTEPYCVIAAVKIFPRFFMVAKQ

SEQ ID NO: 293 - protein, 20 aa, Artificial Sequence
  Description of Artificial Sequence: Synthetic peptide
KCCKIRYCNLEGPPINSSVF

SEQ ID NO: 294 - protein, 9 aa, Artificial Sequence
  Description of Artificial Sequence: Synthetic peptide
EADPTGHSY

SEQ ID NO: 295 - protein, 9 aa, Artificial Sequence
  Description of Artificial Sequence: Synthetic peptide
YLEYRQVPV

SEQ ID NO: 296 - protein, 9 aa, Artificial Sequence
  Description of Artificial Sequence: Synthetic peptide
YLEYRQVPD

SEQ ID NO: 297 - protein, 9 aa, Artificial Sequence
  Description of Artificial Sequence: Synthetic peptide
KVLEYVIKV

SEQ ID NO: 298 - protein, 9 aa, Artificial Sequence
  Description of Artificial Sequence: Synthetic peptide
SLFRAVITK

SEQ ID NO: 299 - protein, 9 aa, Artificial Sequence
  Description of Artificial Sequence: Synthetic peptide
NYKHCFPEI

SEQ ID NO: 300 - protein, 10 aa, Artificial Sequence
  Description of Artificial Sequence: Synthetic peptide
EVYDGREHSA

SEQ ID NO: 301 - protein, 9 aa, Artificial Sequence
  Description of Artificial Sequence: Synthetic peptide
RVRFFFPSL

SEQ ID NO: 302 - protein, 10 aa, Artificial Sequence
  Description of Artificial Sequence: Synthetic peptide
REPVTKAEML

SEQ ID NO: 303 - protein, 10 aa, Artificial Sequence
  Description of Artificial Sequence: Synthetic peptide
KEADPTGHSY

SEQ ID NO: 304 - protein, 9 aa, Artificial Sequence
  Description of Artificial Sequence: Synthetic peptide
DPARYEFLW

SEQ ID NO: 305 - protein, 11 aa, Artificial Sequence
  Description of Artificial Sequence: Synthetic peptide
ITKKVADLVGF

SEQ ID NO: 306 - protein, 9 aa, Artificial Sequence
  Description of Artificial Sequence: Synthetic peptide
SAFPTTINF

SEQ ID NO: 307 - protein, 9 aa, Artificial Sequence
  Description of Artificial Sequence: Synthetic peptide
SAYGEPRKL

SEQ ID NO: 308 - protein, 15 aa, Artificial Sequence
  Description of Artificial Sequence: Synthetic peptide
TSCILESLFRAVITK

SEQ ID NO: 309 - protein, 15 aa, Artificial Sequence
  Description of Artificial Sequence: Synthetic peptide
PRALAETSYVKVLEY

SEQ ID NO: 310 - protein, 16 aa, Artificial Sequence
  Description of Artificial Sequence: Synthetic peptide
FLLLKYRAREPVTKAE

SEQ ID NO: 311 - protein, 12 aa, Artificial Sequence
  Description of Artificial Sequence: Synthetic peptide
EYVIKVSARVRF

SEQ ID NO: 312 - protein, 10 aa, Artificial Sequence
  Description of Artificial Sequence: Synthetic peptide
YLQLVFGIEV

SEQ ID NO: 313 - protein, 9 aa, Artificial Sequence
  Description of Artificial Sequence: Synthetic peptide
LVHFLLLKY

SEQ ID NO: 314 - protein, 9 aa, Artificial Sequence
  Description of Artificial Sequence: Synthetic peptide
KMVELVHFL

SEQ ID NO: 315 - protein, 9 aa, Artificial Sequence
  Description of Artificial Sequence: Synthetic peptide
LVQENYLEY

SEQ ID NO: 316 - protein, 9 aa, Artificial Sequence
  Description of Artificial Sequence: Synthetic peptide
EYLQLVFGI

SEQ ID NO: 317 - protein, 9 aa, Artificial Sequence
  Description of Artificial Sequence: Synthetic peptide
EGDCAPEEK

SEQ ID NO: 318 - protein, 14 aa, Artificial Sequence
  Description of Artificial Sequence: Synthetic peptide
LLKYRAREPVTKAE

SEQ ID NO: 319 - protein, 9 aa, Artificial Sequence
  Description of Artificial Sequence: Synthetic peptide
EVDPIGHLY

SEQ ID NO: 320 - protein, 10 aa, Artificial Sequence
  Description of Artificial Sequence: Synthetic peptide
FLWGPRALVD

SEQ ID NO: 321 - protein, 9 aa, Artificial Sequence
  Description of Artificial Sequence: Synthetic peptide
KVAELVHFL

SEQ ID NO: 322 - protein, 10 aa, Artificial Sequence
  Description of Artificial Sequence: Synthetic peptide
LVFGIELMEV

SEQ ID NO: 323 - protein, 9 aa, Artificial Sequence
  Description of Artificial Sequence: Synthetic peptide
IMPKAGLLI

SEQ ID NO: 324 - protein, 9 aa, Artificial Sequence
  Description of Artificial Sequence: Synthetic peptide
TFPDLESEF

SEQ ID NO: 325 - protein, 9 aa, Artificial Sequence
  Description of Artificial Sequence: Synthetic peptide
VAELVHFLL

SEQ ID NO: 326 - protein, 10 aa, Artificial Sequence
  Description of Artificial Sequence: Synthetic peptide
MEVDPIGHLY

SEQ ID NO: 327 - protein, 9 aa, Artificial Sequence
  Description of Artificial Sequence: Synthetic peptide
YLEYRQVPG

SEQ ID NO: 328 - protein, 10 aa, Artificial Sequence
  Description of Artificial Sequence: Synthetic peptide
AELVHFLLLI

SEQ ID NO: 329 - protein, 9 aa, Artificial Sequence
  Description of Artificial Sequence: Synthetic peptide
WQYFFPVIF

SEQ ID NO: 330 - protein, 16 aa, Artificial Sequence
  Description of Artificial Sequence: Synthetic peptide
KKLLTQHFVQENYLEY

SEQ ID NO: 331 - protein, 15 aa, Artificial Sequence
  Description of Artificial Sequence: Synthetic peptide
RKVAELVHFLLLKYR

SEQ ID NO: 332 - protein, 16 aa, Artificial Sequence
  Description of Artificial Sequence: Synthetic peptide
ACYEFLWGPRALVETS

SEQ ID NO: 333 - protein, 12 aa, Artificial Sequence
  Description of Artificial Sequence: Synthetic peptide
VIFSKASSSLQL

SEQ ID NO: 334 - protein, 15 aa, Artificial Sequence
  Description of Artificial Sequence: Synthetic peptide
VFGIELMEVDPIGHL

SEQ ID NO: 335 - protein, 15 aa, Artificial Sequence
  Description of Artificial Sequence: Synthetic peptide
GDNQIMPKAGLLIIV

SEQ ID NO: 336 - protein, 15 aa, Artificial Sequence
  Description of Artificial Sequence: Synthetic peptide
TSYVKVLHHMVKISG

SEQ ID NO: 337 - protein, 16 aa, Artificial Sequence
  Description of Artificial Sequence: Synthetic peptide
RKVAELVHFLLLKYRA

SEQ ID NO: 338 - protein, 10 aa, Artificial Sequence
  Description of Artificial Sequence: Synthetic peptide
  MOD_RES (10)..(10): Ile or Leu
EVDPASNTYX

SEQ ID NO: 339 - protein, 10 aa, Artificial Sequence
  Description of Artificial Sequence: Synthetic peptide
GVYDGREHTV

SEQ ID NO: 340 - protein, 9 aa, Artificial Sequence
  Description of Artificial Sequence: Synthetic peptide
NYKRCFPVI

SEQ ID NO: 341 - protein, 8 aa, Artificial Sequence
  Description of Artificial Sequence: Synthetic peptide
SESLKMIF

SEQ ID NO: 342 - protein, 9 aa, Artificial Sequence
  Description of Artificial Sequence: Synthetic peptide
MVKISGGPR

SEQ ID NO: 343 - protein, 9 aa, Artificial Sequence
  Description of Artificial Sequence: Synthetic peptide
EVDPIGHVY

SEQ ID NO: 344 - protein, 9 aa, Artificial Sequence
  Description of Artificial Sequence: Synthetic peptide
ISGGPRISY

SEQ ID NO: 345 - protein, 9 aa, Artificial Sequence
  Description of Artificial Sequence: Synthetic peptide
KVAELVRFL

SEQ ID NO: 346 - protein, 9 aa, Artificial Sequence
  Description of Artificial Sequence: Synthetic peptide
GLMDVQIPT

SEQ ID NO: 347 - protein, 9 aa, Artificial Sequence
  Description of Artificial Sequence: Synthetic peptide
ALSVMGVYV

SEQ ID NO: 348 - protein, 10 aa, Artificial Sequence
  Description of Artificial Sequence: Synthetic peptide
GLYDGMEHLI

SEQ ID NO: 349 - protein, 9 aa, Artificial Sequence
  Description of Artificial Sequence: Synthetic peptide
SLLKFLAKV

SEQ ID NO: 350 - protein, 10 aa, Artificial Sequence
  Description of Artificial Sequence: Synthetic peptide
FLWGPRALVE

SEQ ID NO: 351 - protein, 9 aa, Artificial Sequence
  Description of Artificial Sequence: Synthetic peptide
VRIGHLYIL

SEQ ID NO: 352 - protein, 15 aa, Artificial Sequence
  Description of Artificial Sequence: Synthetic peptide
REPFTKAEMLGSVIR

SEQ ID NO: 353 - protein, 14 aa, Artificial Sequence
  Description of Artificial Sequence: Synthetic peptide
AELVHFLLLKYRAR

SEQ ID NO: 354 - protein, 10 aa, Artificial Sequence
  Description of Artificial Sequence: Synthetic peptide
ILFGISLREV

SEQ ID NO: 355 - protein, 9 aa, Artificial Sequence
  Description of Artificial Sequence: Synthetic peptide
KVVEFLAML

SEQ ID NO: 356 - protein, 13 aa, Artificial Sequence
  Description of Artificial Sequence: Synthetic peptide
SSALLSIFQSSPE

SEQ ID NO: 357 - protein, 9 aa, Artificial Sequence
  Description of Artificial Sequence: Synthetic peptide
SFSYTLLSL

SEQ ID NO: 358 - protein, 9 aa, Artificial Sequence
  Description of Artificial Sequence: Synthetic peptide
VSSFFSYTL

SEQ ID NO: 359 - protein, 10 aa, Artificial Sequence
  Description of Artificial Sequence: Synthetic peptide
LLFGLALIEV

SEQ ID NO: 360 - protein, 10 aa, Artificial Sequence
  Description of Artificial Sequence: Synthetic peptide
TLDEKVAELV

SEQ ID NO: 361 - protein, 9 aa, Artificial Sequence
  Description of Artificial Sequence: Synthetic peptide
KVLEFLAKL

SEQ ID NO: 362 - protein, 9 aa, Artificial Sequence
  Description of Artificial Sequence: Synthetic peptide
FLAKLNNTV

SEQ ID NO: 363 - protein, 9 aa, Artificial Sequence
  Description of Artificial Sequence: Synthetic peptide
VIWEVLNAV

SEQ ID NO: 364 - protein, 9 aa, Artificial Sequence
  Description of Artificial Sequence: Synthetic peptide
SESIKKKVL

SEQ ID NO: 365 - protein, 15 aa, Artificial Sequence
  Description of Artificial Sequence: Synthetic peptide
SSTLYLVFSPSSFST

SEQ ID NO: 366 - protein, 9 aa, Artificial Sequence
  Description of Artificial Sequence: Synthetic peptide
FLWGPRALA

SEQ ID NO: 367 - protein, 9 aa, Artificial Sequence
  Description of Artificial Sequence: Synthetic peptide
QLVFGIEVV

SEQ ID NO: 368 - protein, 20 aa, Artificial Sequence
  Description of Artificial Sequence: Synthetic peptide
PDTRPAPGSTAPPAHGVTSA

SEQ ID NO: 369 - protein, 9 aa, Artificial Sequence
  Description of Artificial Sequence: Synthetic peptide
QGQHFLQKV

SEQ ID NO: 370 - protein, 11 aa, Artificial Sequence
  Description of Artificial Sequence: Synthetic peptide
SLLMWITQCFL

SEQ ID NO: 371 - protein, 9 aa, Artificial Sequence
  Description of Artificial Sequence: Synthetic peptide
QLSLLMWIT

SEQ ID NO: 372 - protein, 9 aa, Artificial Sequence
  Description of Artificial Sequence: Synthetic peptide
LLMWITQCF

SEQ ID NO: 373 - protein, 11 aa, Artificial Sequence
  Description of Artificial Sequence: Synthetic peptide
YLAMPFATPME

SEQ ID NO: 374 - protein, 10 aa, Artificial Sequence
  Description of Artificial Sequence: Synthetic peptide
ASGPGGGAPR

SEQ ID NO: 375 - protein, 10 aa, Artificial Sequence
  Description of Artificial Sequence: Synthetic peptide
TVSGNILTIR

SEQ ID NO: 376 - protein, 13 aa, Artificial Sequence
  Description of Artificial Sequence: Synthetic peptide
APRGPHGGAASGL

SEQ ID NO: 377 - protein, 11 aa, Artificial Sequence
  Description of Artificial Sequence: Synthetic peptide
MPFATPMEAEL

SEQ ID NO: 378 - protein, 12 aa, Artificial Sequence
  Description of Artificial Sequence: Synthetic peptide
KEFTVSGNILTI

SEQ ID NO: 379 - protein, 9 aa, Artificial Sequence
  Description of Artificial Sequence: Synthetic peptide
MPFATPMEA

SEQ ID NO: 380 - protein, 9 aa, Artificial Sequence
  Description of Artificial Sequence: Synthetic peptide
FATPMEAEL

SEQ ID NO: 381 - protein, 11 aa, Artificial Sequence
  Description of Artificial Sequence: Synthetic peptide
FATPMEAELAR

SEQ ID NO: 382 - protein, 9 aa, Artificial Sequence
  Description of Artificial Sequence: Synthetic peptide
LAMPFATPM

SEQ ID NO: 383 - protein, 9 aa, Artificial Sequence
  Description of Artificial Sequence: Synthetic peptide
ARGPESRLL

SEQ ID NO: 384 - protein, 25 aa, Artificial Sequence
  Description of Artificial Sequence: Synthetic peptide
LLEFYLAMPFATPMEAELARRSLAQ

SEQ ID NO: 385 - protein, 12 aa, Artificial Sequence
  Description of Artificial Sequence: Synthetic peptide
EFYLAMPFATPM

SEQ ID NO: 386 - protein, 25 aa, Artificial Sequence
  Description of Artificial Sequence: Synthetic peptide
PGVLLKEFTVSGNILTIRLTAADHR

SEQ ID NO: 387 - protein, 12 aa, Artificial Sequence
  Description of Artificial Sequence: Synthetic peptide
RLLEFYLAMPFA

SEQ ID NO: 388 - protein, 13 aa, Artificial Sequence
  Description of Artificial Sequence: Synthetic peptide
PFATPMEAELARR

SEQ ID NO: 389 - protein, 20 aa, Artificial Sequence
  Description of Artificial Sequence: Synthetic peptide
PGVLLKEFTVSGNILTIRLT

SEQ ID NO: 390 - protein, 10 aa, Artificial Sequence
  Description of Artificial Sequence: Synthetic peptide
VLLKEFTVSG

SEQ ID NO: 391 - protein, 15 aa, Artificial Sequence
  Description of Artificial Sequence: Synthetic peptide
LKEFTVSGNILTIRL

SEQ ID NO: 392 - protein, 11 aa, Artificial Sequence
  Description of Artificial Sequence: Synthetic peptide
KEFTVSGNILT

SEQ ID NO: 393 - protein, 14 aa, Artificial Sequence
  Description of Artificial Sequence: Synthetic peptide
LLEFYLAMPFATPM

SEQ ID NO: 394 - protein, 9 aa, Artificial Sequence
  Description of Artificial Sequence: Synthetic peptide
VLQELNVTV

SEQ ID NO: 395 - protein, 9 aa, Artificial Sequence
  Description of Artificial Sequence: Synthetic peptide
ALCNTDSPL

SEQ ID NO: 396 - protein, 10 aa, Artificial Sequence
  Description of Artificial Sequence: Synthetic peptide
LLAARAIVAI

SEQ ID NO: 397 - protein, 9 aa, Artificial Sequence
  Description of Artificial Sequence: Synthetic peptide
TSTTSLELD

SEQ ID NO: 398 - protein, 10 aa, Artificial Sequence
  Description of Artificial Sequence: Synthetic peptide
FLHHLIAEIH

SEQ ID NO: 399 - protein, 9 aa, Artificial Sequence
  Description of Artificial Sequence: Synthetic peptide
DLWKETVFT

SEQ ID NO: 400 - protein, 9 aa, Artificial Sequence
  Description of Artificial Sequence: Synthetic peptide
LYATVIHDI

SEQ ID NO: 401 - protein, 9 aa, Artificial Sequence
  Description of Artificial Sequence: Synthetic peptide
ILDSSEEDK

SEQ ID NO: 402 - protein, 9 aa, Artificial Sequence
  Description of Artificial Sequence: Synthetic peptide
KASEKIFYV

SEQ ID NO: 403 - protein, 9 aa, Artificial Sequence
  Description of Artificial Sequence: Synthetic peptide
RLQGISPKI

SEQ ID NO: 404 - protein, 16 aa, Artificial Sequence
  Description of Artificial Sequence: Synthetic peptide
EKIQKAFDDIAKYFSK

SEQ ID NO: 405 - protein, 11 aa, Artificial Sequence
  Description of Artificial Sequence: Synthetic peptide
FGRLQGISPKI

SEQ ID NO: 406 - protein, 18 aa, Artificial Sequence
  Description of Artificial Sequence: Synthetic peptide
WEKMKASEKIFYVYMKRK

SEQ ID NO: 407 - protein, 15 aa, Artificial Sequence
  Description of Artificial Sequence: Synthetic peptide
KIFYVYMKRKYEAMT

SEQ ID NO: 408 - protein, 14 aa, Artificial Sequence
  Description of Artificial Sequence: Synthetic peptide
KIFYVYMKRKYEAM

SEQ ID NO: 409 - protein, 20 aa, Artificial Sequence
  Description of Artificial Sequence: Synthetic peptide
INKTSGPKRGKHAWTHRLRE

SEQ ID NO: 410 - protein, 20 aa, Artificial Sequence
  Description of Artificial Sequence: Synthetic peptide
YFSKKEWEKMKSSEKIVYVY

SEQ ID NO: 411 - protein, 20 aa, Artificial Sequence
  Description of Artificial Sequence: Synthetic peptide
MKLNYEVMTKLGFKVTLPPF

SEQ ID NO: 412 - protein, 20 aa, Artificial Sequence
  Description of Artificial Sequence: Synthetic peptide
KHAWTHRLRERKQLVVYEEI

SEQ ID NO: 413 - protein, 20 aa, Artificial Sequence
  Description of Artificial Sequence: Synthetic peptide
LGFKVTLPPFMRSKRAADFH

SEQ ID NO: 414 - protein, 20 aa, Artificial Sequence
  Description of Artificial Sequence: Synthetic peptide
KSSEKIVYVYMKLNYEVMTK

SEQ ID NO: 415 - protein, 9 aa, Artificial Sequence
  Description of Artificial Sequence: Synthetic peptide
RLSNRLLLR

SEQ ID NO: 416 - protein, 9 aa, Artificial Sequence
  Description of Artificial Sequence: Synthetic peptide
SLGWLFLLL

SEQ ID NO: 417 - protein, 9 aa, Artificial Sequence
  Description of Artificial Sequence: Synthetic peptide
LSRLSNRLL

SEQ ID NO: 418 - protein, 9 aa, Artificial Sequence
  Description of Artificial Sequence: Synthetic peptide
LTYVSFRNL

SEQ ID NO: 419 - protein, 9 aa, Artificial Sequence
  Description of Artificial Sequence: Synthetic peptide
DLPAYVRNL

SEQ ID NO: 420 - protein, 9 aa, Artificial Sequence
  Description of Artificial Sequence: Synthetic peptide
FLTGNQLAV

SEQ ID NO: 421 - protein, 9 aa, Artificial Sequence
  Description of Artificial Sequence: Synthetic peptide
GAFEHLPSL

SEQ ID NO: 422 - protein, 9 aa, Artificial Sequence
  Description of Artificial Sequence: Synthetic peptide
RLARLALVL

SEQ ID NO: 423 - protein, 9 aa, Artificial Sequence
  Description of Artificial Sequence: Synthetic peptide
PLADLSPFA

SEQ ID NO: 424 - protein, 9 aa, Artificial Sequence
  Description of Artificial Sequence: Synthetic peptide
ILLRDAGLV

SEQ ID NO: 425 - protein, 15 aa, Artificial Sequence
  Description of Artificial Sequence: Synthetic peptide
CEFHACWPAFTVLGE

SEQ ID NO: 426 - protein, 9 aa, Artificial Sequence
  Description of Artificial Sequence: Synthetic peptide
ATTNILEHY

SEQ ID NO: 427 - protein, 10 aa, Artificial Sequence
  Description of Artificial Sequence: Synthetic peptide
EVISCKLIKR

SEQ ID NO: 428 - protein, 9 aa, Artificial Sequence
  Description of Artificial Sequence: Synthetic peptide
SYRNEIAYL

SEQ ID NO: 429 - protein, 9 aa, Artificial Sequence
  Description of Artificial Sequence: Synthetic peptide
RQKKIRIQL

SEQ ID NO: 430 - protein, 16 aa, Artificial Sequence
  Description of Artificial Sequence: Synthetic peptide
HLGSRQKKIRIQLRSQ

SEQ ID NO: 431 - protein, 17 aa, Artificial Sequence
  Description of Artificial Sequence: Synthetic peptide
CATWKVICKSCISQTPG

SEQ ID NO: 432 - protein, 8 aa, Artificial Sequence
  Description of Artificial Sequence: Synthetic peptide
AFLRHAAL

SEQ ID NO: 433 - protein, 10 aa, Artificial Sequence
  Description of Artificial Sequence: Synthetic peptide
DYPSLSATDI

SEQ ID NO: 434 - protein, 9 aa, Artificial Sequence
  Description of Artificial Sequence: Synthetic peptide
YMMPVNSEV

SEQ ID NO: 435 - protein, 9 aa, Artificial Sequence
  Description of Artificial Sequence: Synthetic peptide
KLATAQFKI

SEQ ID NO: 436 - protein, 10 aa, Artificial Sequence
  Description of Artificial Sequence: Synthetic peptide
VYVKGLLAKI

SEQ ID NO: 437 - protein, 9 aa, Artificial Sequence
  Description of Artificial Sequence: Synthetic peptide
ALVDAGVPM

SEQ ID NO: 438 - protein, 9 aa, Artificial Sequence
  Description of Artificial Sequence: Synthetic peptide
FLWGPRAYA

SEQ ID NO: 439 - protein, 9 aa, Artificial Sequence
  Description of Artificial Sequence: Synthetic peptide
RLLVPTQFV

SEQ ID NO: 440 - protein, 9 aa, Artificial Sequence
  Description of Artificial Sequence: Synthetic peptide
NLSSAEVVV

SEQ ID NO: 441 - protein, 9 aa, Artificial Sequence
  Description of Artificial Sequence: Synthetic peptide
KTVNELQNL

SEQ ID NO: 442 - protein, 9 aa, Artificial Sequence
  Description of Artificial Sequence: Synthetic peptide
FLPDHINIV

SEQ ID NO: 443 - protein, 9 aa, Artificial Sequence
  Description of Artificial Sequence: Synthetic peptide
KTPFVSPLL

SEQ ID NO: 444 - protein, 10 aa, Artificial Sequence
  Description of Artificial Sequence: Synthetic peptide
QLLDGFMITL

SEQ ID NO: 445 - protein, 9 aa, Artificial Sequence
  Description of Artificial Sequence: Synthetic peptide
YLVGNVCIL

SEQ ID NO: 446 - protein, 9 aa, Artificial Sequence
  Description of Artificial Sequence: Synthetic peptide
ELSDSLGPV

SEQ ID NO: 447 - protein, 9 aa, Artificial Sequence
  Description of Artificial Sequence: Synthetic peptide
ILSLELMKL

SEQ ID NO: 448 - protein, 9 aa, Artificial Sequence
  Description of Artificial Sequence: Synthetic peptide
SLEENIVIL

SEQ ID NO: 449 - protein, 9 aa, Artificial Sequence
  Description of Artificial Sequence: Synthetic peptide
KGSGKMKTE

SEQ ID NO: 450 - protein, 9 aa, Artificial Sequence
  Description of Artificial Sequence: Synthetic peptide
EYRGFTQDF

SEQ ID NO: 451 - protein, 9 aa, Artificial Sequence
  Description of Artificial Sequence: Synthetic peptide
RLAEYQAYI

SEQ ID NO: 452 - protein, 9 aa, Artificial Sequence
  Description of Artificial Sequence: Synthetic peptide
LLQAEAPRL

SEQ ID NO: 453 - protein, 9 aa, Artificial Sequence
  Description of Artificial Sequence: Synthetic peptide
WLEYYNLER

SEQ ID NO: 454 - protein, 9 aa, Artificial Sequence
  Description of Artificial Sequence: Synthetic peptide
QIRPIFSNR

SEQ ID NO: 455 - protein, 10 aa, Artificial Sequence
  Description of Artificial Sequence: Synthetic peptide
VYDYNCHVDL

SEQ ID NO: 456 - protein, 9 aa, Artificial Sequence
  Description of Artificial Sequence: Synthetic peptide
AYIDFEMKI

SEQ ID NO: 457 - protein, 10 aa, Artificial Sequence
  Description of Artificial Sequence: Synthetic peptide
YLSGANLNLG

SEQ ID NO: 458 - protein, 9 aa, Artificial Sequence
  Description of Artificial Sequence: Synthetic peptide
IMIGVLVGV

SEQ ID NO: 459 - protein, 9 aa, Artificial Sequence
  Description of Artificial Sequence: Synthetic peptide
GVLVGVALI

SEQ ID NO: 460 - protein, 10 aa, Artificial Sequence
  Description of Artificial Sequence: Synthetic peptide
VLYGPDAPTV

SEQ ID NO: 461 - protein, 9 aa, Artificial Sequence
  Description of Artificial Sequence: Synthetic peptide
YLSGANLNV

SEQ ID NO: 462 - protein, 9 aa, Artificial Sequence
  Description of Artificial Sequence: Synthetic peptide
ATVGIMIGV

SEQ ID NO: 463 - protein, 9 aa, Artificial Sequence
  Description of Artificial Sequence: Synthetic peptide
HLFGYSWYK

SEQ ID NO: 464 - protein, 10 aa, Artificial Sequence
  Description of Artificial Sequence: Synthetic peptide
QYSWFVNGTF

SEQ ID NO: 465 - protein, 9 aa, Artificial Sequence
  Description of Artificial Sequence: Synthetic peptide
TYACFVSNL

SEQ ID NO: 466 - protein, 10 aa, Artificial Sequence
  Description of Artificial Sequence: Synthetic peptide
HRWCIPWQRL

SEQ ID NO: 467 - protein, 15 aa, Artificial Sequence
  Description of Artificial Sequence: Synthetic peptide
AYVCGIQNSVSANRS

SEQ ID NO: 468 - protein, 25 aa, Artificial Sequence
  Description of Artificial Sequence: Synthetic peptide
DTGFYTLHVIKSDLVNEEATGQFRV

SEQ ID NO: 469 - protein, 15 aa, Artificial Sequence
  Description of Artificial Sequence: Synthetic peptide
YSWRINGIPQQHTQV

SEQ ID NO: 470 - protein, 13 aa, Artificial Sequence
  Description of Artificial Sequence: Synthetic peptide
TYYRPGVNLSLSC

SEQ ID NO: 471 - protein, 13 aa, Artificial Sequence
  Description of Artificial Sequence: Synthetic peptide
EIIYPNASLLIQN

SEQ ID NO: 472 - protein, 15 aa, Artificial Sequence
  Description of Artificial Sequence: Synthetic peptide
YACFVSNLATGRNNS

SEQ ID NO: 473 - protein, 13 aa, Artificial Sequence
  Description of Artificial Sequence: Synthetic peptide
LWWVNNQSLPVSP

SEQ ID NO: 474 - protein, 13 aa, Artificial Sequence
  Description of Artificial Sequence: Synthetic peptide
NSIVKSITVSASG

SEQ ID NO: 475 - protein, 9 aa, Artificial Sequence
  Description of Artificial Sequence: Synthetic peptide
KTWGQYWQV

SEQ ID NO: 476 - protein, 10 aa, Artificial Sequence
  Description of Artificial Sequence: Synthetic peptide
AMLGTHTMEV

SEQ ID NO: 477 - protein, 9 aa, Artificial Sequence
  Description of Artificial Sequence: Synthetic peptide
IMDQVPFSV

SEQ ID NO: 478 - protein, 9 aa, Artificial Sequence
  Description of Artificial Sequence: Synthetic peptide
YLEPGPVTA

SEQ ID NO: 479 - protein, 10 aa, Artificial Sequence
  Description of Artificial Sequence: Synthetic peptide
LLDGTATLRL

SEQ ID NO: 480 - protein, 10 aa, Artificial Sequence
  Description of Artificial Sequence: Synthetic peptide
VLYRYGSFSV

SEQ ID NO: 481 - protein, 10 aa, Artificial Sequence
  Description of Artificial Sequence: Synthetic peptide
SLADTNSLAV

SEQ ID NO: 482 - protein, 9 aa, Artificial Sequence
  Description of Artificial Sequence: Synthetic peptide
RLMKQDFSV

SEQ ID NO: 483 - protein, 9 aa, Artificial Sequence
  Description of Artificial Sequence: Synthetic peptide
RLPRIFCSC

SEQ ID NO: 484 - protein, 9 aa, Artificial Sequence
  Description of Artificial Sequence: Synthetic peptide
LIYRRRLMK

SEQ ID NO: 485 - protein, 9 aa, Artificial Sequence
  Description of Artificial Sequence: Synthetic peptide
ALLAVGATK

SEQ ID NO: 486 - protein, 10 aa, Artificial Sequence
  Description of Artificial Sequence: Synthetic peptide
IALNFPGSQK

SEQ ID NO: 487 - protein, 9 aa, Artificial Sequence
  Description of Artificial Sequence: Synthetic peptide
RSYVPLAHR

SEQ ID NO: 488 - protein, 9 aa, Artificial Sequence
  Description of Artificial Sequence: Synthetic peptide
ALNFPGSQK

SEQ ID NO: 489 - protein, 9 aa, Artificial Sequence
  Description of Artificial Sequence: Synthetic peptide
VYFFLPDHL

SEQ ID NO: 490 - protein, 9 aa, Artificial Sequence
  Description of Artificial Sequence: Synthetic peptide
RTKQLYPEW

SEQ ID NO: 491 - protein, 10 aa, Artificial Sequence
  Description of Artificial Sequence: Synthetic peptide
HTMEVTVYHR

SEQ ID NO: 492 - protein, 9 aa, Artificial Sequence
  Description of Artificial Sequence: Synthetic peptide
SSPGCQPPA

SEQ ID NO: 493 - protein, 10 aa, Artificial Sequence
  Description of Artificial Sequence: Synthetic peptide
VPLDCVLYRY

SEQ ID NO: 494 - protein, 9 aa, Artificial Sequence
  Description of Artificial Sequence: Synthetic peptide
LPHSSSHWL

SEQ ID NO: 495 - protein, 8 aa, Artificial Sequence
  Description of Artificial Sequence: Synthetic peptide
SNDGPTLI

SEQ ID NO: 496 - protein, 15 aa, Artificial Sequence
  Description of Artificial Sequence: Synthetic peptide
GRAMLGTHTMEVTVY

SEQ ID NO: 497 - protein, 16 aa, Artificial Sequence
  Description of Artificial Sequence: Synthetic peptide
WNRQLYPEWTEAQRLD

SEQ ID NO: 498 - protein, 18 aa, Artificial Sequence
  Description of Artificial Sequence: Synthetic peptide
TTEWVETTARELPIPEPE

SEQ ID NO: 499 - protein, 17 aa, Artificial Sequence
  Description of Artificial Sequence: Synthetic peptide
TGRAMLGTHTMEVTVYH

SEQ ID NO: 500 - protein, 9 aa, Artificial Sequence
  Description of Artificial Sequence: Synthetic peptide
FLNQTDETL

SEQ ID NO: 501 - protein, 9 aa, Artificial Sequence
  Description of Artificial Sequence: Synthetic peptide
MQLIYDSSL

SEQ ID NO: 502 - protein, 9 aa, Artificial Sequence
  Description of Artificial Sequence: Synthetic peptide
KLLMVLMLA

SEQ ID NO: 503 - protein, 10 aa, Artificial Sequence
  Description of Artificial Sequence: Synthetic peptide
LIYDSSLCDL

SEQ ID NO: 504 - protein, 9 aa, Artificial Sequence
  Description of Artificial Sequence: Synthetic peptide
AIDELKECF

SEQ ID NO: 505 - protein, 9 aa, Artificial Sequence
  Description of Artificial Sequence: Synthetic peptide
TTNAIDELK

SEQ ID NO: 506 - protein, 9 aa, Artificial Sequence
  Description of Artificial Sequence: Synthetic peptide
PLLENVISK

SEQ ID NO: 507 - protein, 9 aa, Artificial Sequence
  Description of Artificial Sequence: Synthetic peptide
ILTVILGVL

SEQ ID NO: 508 - protein, 11 aa, Artificial Sequence
  Description of Artificial Sequence: Synthetic peptide
AEEAAGIGILT

SEQ ID NO: 509 - protein, 11 aa, Artificial Sequence
  Description of Artificial Sequence: Synthetic peptide
RNGYRALMDKS

SEQ ID NO: 510 - protein, 30 aa, Artificial Sequence
  Description of Artificial Sequence: Synthetic polypeptide
YTTAEEAAGIGILTVILGVLLLIGCWYCRR

SEQ ID NO: 511 - protein, 12 aa, Artificial Sequence
  Description of Artificial Sequence: Synthetic peptide
EEAAGIGILTVI

SEQ ID NO: 512 - protein, 14 aa, Artificial Sequence
  Description of Artificial Sequence: Synthetic peptide
AAGIGILTVILGVL

SEQ ID NO: 513 - protein, 14 aa, Artificial Sequence
  Description of Artificial Sequence: Synthetic peptide
APPAYEKLPSAEQF

SEQ ID NO: 514 - protein, 23 aa, Artificial Sequence
  Description of Artificial Sequence: Synthetic peptide
RNGYRALMDKSLHVGTQCALTRR

SEQ ID NO: 515 - protein, 20 aa, Artificial Sequence
  Description of Artificial Sequence: Synthetic peptide
MPREDAHFIYGYPKKGHGHS

SEQ ID NO: 516 - protein, 20 aa, Artificial Sequence
  Description of Artificial Sequence: Synthetic peptide
KNCEPVVPNAPPAYEKLSAE

SEQ ID NO: 517 - protein, 9 aa, Artificial Sequence
  Description of Artificial Sequence: Synthetic peptide
TILLGIFFL

SEQ ID NO: 518 - protein, 9 aa, Artificial Sequence
  Description of Artificial Sequence: Synthetic peptide
FLALIICNA

SEQ ID NO: 519 - protein, 10 aa, Artificial Sequence
  Description of Artificial Sequence: Synthetic peptide
KLLGPHVEGL

SEQ ID NO: 520 - protein, 10 aa, Artificial Sequence
  Description of Artificial Sequence: Synthetic peptide
KLLGPHVLGV

SEQ ID NO: 521 - protein, 10 aa, Artificial Sequence
  Description of Artificial Sequence: Synthetic peptide
GLFDEYLEMV

SEQ ID NO: 522 - protein, 9 aa, Artificial Sequence
  Description of Artificial Sequence: Synthetic peptide
SLSKILDTV

SEQ ID NO: 523 - protein, 10 aa, Artificial Sequence
  Description of Artificial Sequence: Synthetic peptide
LLSHGAVIEV

SEQ ID NO: 524 - protein, 9 aa, Artificial Sequence
  Description of Artificial Sequence: Synthetic peptide
LYSACFWWL

SEQ ID NO: 525 - protein, 9 aa, Artificial Sequence
  Description of Artificial Sequence: Synthetic peptide
FLFLLFFWL

SEQ ID NO: 526 - protein, 9 aa, Artificial Sequence
  Description of Artificial Sequence: Synthetic peptide
TLMSAMTNL

SEQ ID NO: 527 - protein, 9 aa, Artificial Sequence
  Description of Artificial Sequence: Synthetic peptide
ALDVYNGLL

SEQ ID NO: 528 - protein, 9 aa, Artificial Sequence
  Description of Artificial Sequence: Synthetic peptide
IMLCLIAAV

SEQ ID NO: 529 - protein, 10 aa, Artificial Sequence
  Description of Artificial Sequence: Synthetic peptide
FLTPKKLQCV

SEQ ID NO: 530 - protein, 10 aa, Artificial Sequence
  Description of Artificial Sequence: Synthetic peptide
VISNDVCAQV

SEQ ID NO: 531 - protein, 9 aa, Artificial Sequence
  Description of Artificial Sequence: Synthetic peptide
VLHWDPETV

SEQ ID NO: 532 - protein, 9 aa, Artificial Sequence
  Description of Artificial Sequence: Synthetic peptide
FLRNFSLMV

SEQ ID NO: 533 - protein, 9 aa, Artificial Sequence
  Description of Artificial Sequence: Synthetic peptide
FVFLRNFSL

SEQ ID NO: 534 - protein, 9 aa, Artificial Sequence
  Description of Artificial Sequence: Synthetic peptide
FLRNFSLML

SEQ ID NO: 535 - protein, 9 aa, Artificial Sequence
  Description of Artificial Sequence: Synthetic peptide
MSLQRQFLR

SEQ ID NO: 536 - protein, 21 aa, Artificial Sequence
  Description of Artificial Sequence: Synthetic peptide
ISPNSVFSQWRVVCDSLEDYD

SEQ ID NO: 537 - protein, 10 aa, Artificial Sequence
  Description of Artificial Sequence: Synthetic peptide
SLPYWNFATG

SEQ ID NO: 538 - protein, 15 aa, Artificial Sequence
  Description of Artificial Sequence: Synthetic peptide
SQWRVVCDSLEDYDT

SEQ ID NO: 539 - protein, 10 aa, Artificial Sequence
  Description of Artificial Sequence: Synthetic peptide
VYDFFVWLHY

SEQ ID NO: 540 - protein, 9 aa, Artificial Sequence
  Description of Artificial Sequence: Synthetic peptide
SLDDYNHLV

SEQ ID NO: 541 - protein, 9 aa, Artificial Sequence
  Description of Artificial Sequence: Synthetic peptide
FVWLHYYSV

SEQ ID NO: 542 - protein, 9 aa, Artificial Sequence
  Description of Artificial Sequence: Synthetic peptide
SVYDFFVWL

SEQ ID NO: 543 - protein, 9 aa, Artificial Sequence
  Description of Artificial Sequence: Synthetic peptide
TLDSQVMSL

SEQ ID NO: 544 - protein, 9 aa, Artificial Sequence
  Description of Artificial Sequence: Synthetic peptide
LLGPGRPYR

SEQ ID NO: 545 - protein, 9 aa, Artificial Sequence
  Description of Artificial Sequence: Synthetic peptide
ANDPIFVVL

SEQ ID NO: 546 - protein, 15 aa, Artificial Sequence
  Description of Artificial Sequence: Synthetic peptide
QCTEVRADTRPWSGP

SEQ ID NO: 547 - protein, 10 aa, Artificial Sequence
  Description of Artificial Sequence: Synthetic peptide
ALPYWNFATG

SEQ ID NO: 548 - protein, 9 aa, Artificial Sequence
  Description of Artificial Sequence: Synthetic peptide
KCDICTDEY

SEQ ID NO: 549 - protein, 10 aa, Artificial Sequence
  Description of Artificial Sequence: Synthetic peptide
DSDPDSFQDY

SEQ ID NO: 550 - protein, 11 aa, Artificial Sequence
  Description of Artificial Sequence: Synthetic peptide
SSDYVIPIGTY

SEQ ID NO: 551 - protein, 9 aa, Artificial Sequence
  Description of Artificial Sequence: Synthetic peptide
MLLAVLYCL

SEQ ID NO: 552 - protein, 10 aa, Artificial Sequence
  Description of Artificial Sequence: Synthetic peptide
CLLWSFQTSA

SEQ ID NO: 553 - protein, 9 aa, Artificial Sequence
  Description of Artificial Sequence: Synthetic peptide
AFLPWHRLF

SEQ ID NO: 554 - protein, 11 aa, Artificial Sequence
  Description of Artificial Sequence: Synthetic peptide
IYMDGTADFSF

SEQ ID NO: 555 - protein, 9 aa, Artificial Sequence
  Description of Artificial Sequence: Synthetic peptide
QCSGNFMGF

SEQ ID NO: 556 - protein, 12 aa, Artificial Sequence
  Description of Artificial Sequence: Synthetic peptide
TPRLPSSADVEF

SEQ ID NO: 557 - protein, 9 aa, Artificial Sequence
  Description of Artificial Sequence: Synthetic peptide
LPSSADVEF

SEQ ID NO: 558 - protein, 10 aa, Artificial Sequence
  Description of Artificial Sequence: Synthetic peptide
LHHAFVDSIF

SEQ ID NO: 559 - protein, 10 aa, Artificial Sequence
  Description of Artificial Sequence: Synthetic peptide
SEIWRDIDFD

SEQ ID NO: 560 - protein, 15 aa, Artificial Sequence
  Description of Artificial Sequence: Synthetic peptide
QNILLSNAPLGPQFP

SEQ ID NO: 561 - protein, 13 aa, Artificial Sequence
  Description of Artificial Sequence: Synthetic peptide
SYLQDSDPDSFQD

SEQ ID NO: 562 - protein, 21 aa, Artificial Sequence [sequence omitted]

SEQ ID NO: 563 - protein, 10 aa, Artificial Sequence
  Description of Artificial Sequence: Synthetic peptide
SACDVSVRVV

SEQ ID NO: 564 - protein, 9 aa, Artificial Sequence
  Description of Artificial Sequence: Synthetic peptide
YTDFVGEGL

SEQ ID NO: 565 - protein, 9 aa, Artificial Sequence
  Description of Artificial Sequence: Synthetic peptide
YLIELIDRV

SEQ ID NO: 566 - protein, 9 aa, Artificial Sequence
  Description of Artificial Sequence: Synthetic peptide
SVASTITGV

SEQ ID NO: 567 - protein, 9 aa, Artificial Sequence
  Description of Artificial Sequence: Synthetic peptide
CITFQVWDV

SEQ ID NO: 568 - protein, 10 aa, Artificial Sequence
  Description of Artificial Sequence: Synthetic peptide
FLPHFQALHV

SEQ ID NO: 569 - protein, 10 aa, Artificial Sequence
  Description of Artificial Sequence: Synthetic peptide
RSDSGQQARY

SEQ ID NO: 570 - protein, 9 aa, Artificial Sequence
  Description of Artificial Sequence: Synthetic peptide
LLYKLADLI

SEQ ID NO: 571 - protein, 10 aa, Artificial Sequence
  Description of Artificial Sequence: Synthetic peptide
SLAMLDLLHV

SEQ ID NO: 572 - protein, 9 aa, Artificial Sequence
  Description of Artificial Sequence: Synthetic peptide
MVYDLYKTL

SEQ ID NO: 573 - protein, 9 aa, Artificial Sequence
  Description of Artificial Sequence: Synthetic peptide
RLDFNLIRV

SEQ ID NO: 574 - protein, 9 aa, Artificial Sequence
  Description of Artificial Sequence: Synthetic peptide
GLQHWVPEL

SEQ ID NO: 575 - protein, 9 aa, Artificial Sequence
  Description of Artificial Sequence: Synthetic peptide
NLFETPVEA

SEQ ID NO: 576 - protein, 9 aa, Artificial Sequence
  Description of Artificial Sequence: Synthetic peptide
KLDVGNAEV

SEQ ID NO: 577 - protein, 10 aa, Artificial Sequence
  Description of Artificial Sequence: Synthetic peptide
YLLQGMIAAV

SEQ ID NO: 578 - protein, 9 aa, Artificial Sequence
  Description of Artificial Sequence: Synthetic peptide
YLQGMIAAV

SEQ ID NO: 579 - protein, 10 aa, Artificial Sequence
  Description of Artificial Sequence: Synthetic peptide
PLFDFSWLSL

SEQ ID NO: 580 - protein, 10 aa, Artificial Sequence
  Description of Artificial Sequence: Synthetic peptide
WLSLKTLLSL

SEQ ID NO: 581 - protein, 10 aa, Artificial Sequence
  Description of Artificial Sequence: Synthetic peptide
YLNDHLEPWI

SEQ ID NO: 582 - protein, 9 aa, Artificial Sequence
  Description of Artificial Sequence: Synthetic peptide
CQWGRLWQL

SEQ ID NO: 583 - protein, 10 aa, Artificial Sequence
  Description of Artificial Sequence: Synthetic peptide
VFLPCDSWNL

SEQ ID NO: 584 - protein, 11 aa, Artificial Sequence
  Description of Artificial Sequence: Synthetic peptide
CIPPDSLLFPA

SEQ ID NO: 585 - protein, 10 aa, Artificial Sequence
  Description of Artificial Sequence: Synthetic peptide
YTLDRDSLYV

SEQ ID NO: 586 - protein, 9 aa, Artificial Sequence
  Description of Artificial Sequence: Synthetic peptide
FIIENLKAA

SEQ ID NO: 587 - protein, 9 aa, Artificial Sequence
  Description of Artificial Sequence: Synthetic peptide
FILPVLGAV

SEQ ID NO: 588 - protein, 10 aa, Artificial Sequence
  Description of Artificial Sequence: Synthetic peptide
VLLQAGSLHA

SEQ ID NO: 589 - protein, 9 aa, Artificial Sequence
  Description of Artificial Sequence: Synthetic peptide
LLGNCLPTV

SEQ ID NO: 590 - protein, 9 aa, Artificial Sequence
  Description of Artificial Sequence: Synthetic peptide
SLQALKVTV

SEQ ID NO: 591 - protein, 10 aa, Artificial Sequence
  Description of Artificial Sequence: Synthetic peptide
NLVRDDGSAV

SEQ ID NO: 592 - protein, 9 aa, Artificial Sequence
  Description of Artificial Sequence: Synthetic peptide
RLFAFVRFT

SEQ ID NO: 593 - protein, 10 aa, Artificial Sequence
  Description of Artificial Sequence: Synthetic peptide
VVQNFAKEFV

SEQ ID NO: 594 - protein, 9 aa, Artificial Sequence
  Description of Artificial Sequence: Synthetic peptide
KFLDALISL

SEQ ID NO: 595 - protein, 9 aa, Artificial Sequence
  Description of Artificial Sequence: Synthetic peptide
LLNAFTVTV

SEQ ID NO: 596 - protein, 9 aa, Artificial Sequence
  Description of Artificial Sequence: Synthetic peptide
FAWERVRGL

SEQ ID NO: 597 - protein, 9 aa, Artificial Sequence
  Description of Artificial Sequence: Synthetic peptide
GLGLPKLYL

SEQ ID NO: 598 - protein, 9 aa, Artificial Sequence
  Description of Artificial Sequence: Synthetic peptide
LMAGCIQEA

SEQ ID NO: 599 - protein, 9 aa, Artificial Sequence
  Description of Artificial Sequence: Synthetic peptide
LLEEMFLTV

SEQ ID NO: 600 - protein, 9 aa, Artificial Sequence
  Description of Artificial Sequence: Synthetic peptide
KVHPVIWSL

SEQ ID NO: 601 - protein, 10 aa, Artificial Sequence
  Description of Artificial Sequence: Synthetic peptide
LMLQNALTTM

SEQ ID NO: 602 - protein, 9 aa, Artificial Sequence
  Description of Artificial Sequence: Synthetic peptide
YVDPVITSI

SEQ ID NO: 603 - protein, 9 aa, Artificial Sequence
  Description of Artificial Sequence: Synthetic peptide
FMTRKLWDL

SEQ ID NO: 604 - protein, 9 aa, Artificial Sequence
  Description of Artificial Sequence: Synthetic peptide
RLLASLQDL

SEQ ID NO: 605 - protein, 9 aa, Artificial Sequence
  Description of Artificial Sequence: Synthetic peptide
ALYGDIDAV

SEQ ID NO: 606 - protein, 9 aa, Artificial Sequence
  Description of Artificial Sequence: Synthetic peptide
LLDRFLATV

SEQ ID NO: 607 - protein, 9 aa, Artificial Sequence
  Description of Artificial Sequence: Synthetic peptide
ILIDWLVQV

SEQ ID NO: 608 - protein, 9 aa, Artificial Sequence
  Description of Artificial Sequence: Synthetic peptide
AKYLMELTM

SEQ ID NO: 609 - protein, 9 aa, Artificial Sequence
  Description of Artificial Sequence: Synthetic peptide
AGYLMELCC

SEQ ID NO: 610 - protein, 9 aa, Artificial Sequence
  Description of Artificial Sequence: Synthetic peptide
LLGATCMFV

SEQ ID NO: 611 - protein, 15 aa, Artificial Sequence
  Description of Artificial Sequence: Synthetic peptide
NPPSMVAAGSVVAAV

SEQ ID NO: 612 - protein, 8 aa, Artificial Sequence
  Description of Artificial Sequence: Synthetic peptide
VLEGMEVV

SEQ ID NO: 613 - protein, 10 aa, Artificial Sequence
  Description of Artificial Sequence: Synthetic peptide
KLKHYGPGWV

SEQ ID NO: 614 - protein, 9 aa, Artificial Sequence
  Description of Artificial Sequence: Synthetic peptide
DFMIQGGDF

SEQ ID NO: 615 - protein, 9 aa, Artificial Sequence
  Description of Artificial Sequence: Synthetic peptide
KFHRVIKDF

SEQ ID NO: 616 - protein, 9 aa, Artificial Sequence
  Description of Artificial Sequence: Synthetic peptide
WLQYFPNPV

SEQ ID NO: 617 - protein, 10 aa, Artificial Sequence
  Description of Artificial Sequence: Synthetic peptide
ALGGHPLLGV

SEQ ID NO: 618 - protein, 9 aa, Artificial Sequence
  Description of Artificial Sequence: Synthetic peptide
ITDFGLAKL

SEQ ID NO: 619 - protein, 9 aa, Artificial Sequence
  Description of Artificial Sequence: Synthetic peptide
TMNGSKSPV

SEQ ID NO: 620 - protein, 9 aa, Artificial Sequence
  Description of Artificial Sequence: Synthetic peptide
YQLDPKFIV

SEQ ID NO: 621 - protein, 9 aa, Artificial Sequence
  Description of Artificial Sequence: Synthetic peptide
GLKAGVIAV

SEQ ID NO: 622 - protein, 10 aa, Artificial Sequence
  Description of Artificial Sequence: Synthetic peptide
ILYENNVITV

SEQ ID NO: 623 - protein, 9 aa, Artificial Sequence
  Description of Artificial Sequence: Synthetic peptide
ILYENNVIV

SEQ ID NO: 624 - protein, 9 aa, Artificial Sequence
  Description of Artificial Sequence: Synthetic peptide
RYQLDPKFI

SEQ ID NO: 625 - protein, 9 aa, Artificial Sequence
  Description of Artificial Sequence: Synthetic peptide
VLLLVLAGV

SEQ ID NO: 626 - protein, 9 aa, Artificial Sequence
  Description of Artificial Sequence: Synthetic peptide
TLADFDPRV

SEQ ID NO: 627 - protein, 9 aa, Artificial Sequence
  Description of Artificial Sequence: Synthetic peptide
VLAGVGFFI

SEQ ID NO: 628 - protein, 9 aa, Artificial Sequence
  Description of Artificial Sequence: Synthetic peptide
IMNDMPIYM

SEQ ID NO: 629 - protein, 12 aa, Artificial Sequence
  Description of Artificial Sequence: Synthetic peptide
DVTFNIICKKCG

SEQ ID NO: 630 - protein, 9 aa, Artificial Sequence
  Description of Artificial Sequence: Synthetic peptide
FMVEDETVL

SEQ ID NO: 631 - protein, 10 aa, Artificial Sequence
  Description of Artificial Sequence: Synthetic peptide
FINDEIFVEL

SEQ ID NO: 632 - protein, 9 aa, Artificial Sequence
  Description of Artificial Sequence: Synthetic peptide
KYDCFLHPF

SEQ ID NO: 633 - protein, 9 aa, Artificial Sequence
  Description of Artificial Sequence: Synthetic peptide
KYVGIEREM

SEQ ID NO: 634 - protein, 10 aa, Artificial Sequence
  Description of Artificial Sequence: Synthetic peptide
NTYASPRFKF

SEQ ID NO: 635 - protein, 9 aa, Artificial Sequence
  Description of Artificial Sequence: Synthetic peptide
FVGEFFTDV

SEQ ID NO: 636 - protein, 9 aa, Artificial Sequence
  Description of Artificial Sequence: Synthetic peptide
EYILSLEEL

SEQ ID NO: 637 - protein, 9 aa, Artificial Sequence
  Description of Artificial Sequence: Synthetic peptide
HLSTAFARV

SEQ ID NO: 638 - protein, 10 aa, Artificial Sequence
  Description of Artificial Sequence: Synthetic peptide
KYLKLSSSEL

SEQ ID NO: 639 - protein, 9 aa, Artificial Sequence
  Description of Artificial Sequence: Synthetic peptide
TMTRVLQGV

SEQ ID NO: 640 - protein, 10 aa, Artificial Sequence
  Description of Artificial Sequence: Synthetic peptide
GVNPVVSYAV

SEQ ID NO: 641 - protein, 9 aa, Artificial Sequence
  Description of Artificial Sequence: Synthetic peptide
VLQVGLPAL

SEQ ID NO: 642 - protein, 9 aa, Artificial Sequence
  Description of Artificial Sequence: Synthetic peptide
PAFSYSFFV

SEQ ID NO: 643 - protein, 9 aa, Artificial Sequence
  Description of Artificial Sequence: Synthetic peptide
LLLGPLGPL

SEQ ID NO: 644 - protein, 9 aa, Artificial Sequence
  Description of Artificial Sequence: Synthetic peptide
KMLKSFLKA

SEQ ID NO: 645 - protein, 9 aa, Artificial Sequence
  Description of Artificial Sequence: Synthetic peptide
ALPPPLMLL

SEQ ID NO: 646 - protein, 9 aa, Artificial Sequence
  Description of Artificial Sequence: Synthetic peptide
WLSLLFKKL

SEQ ID NO: 647 - protein, 9 aa, Artificial Sequence
  Description of Artificial Sequence: Synthetic peptide
KIFGSLAFL

SEQ ID NO: 648 - protein, 9 aa, Artificial Sequence
  Description of Artificial Sequence: Synthetic peptide
IISAVVGIL

SEQ ID NO: 649 - protein, 9 aa, Artificial Sequence
  Description of Artificial Sequence: Synthetic peptide
ALCRWGLLL

SEQ ID NO: 650 - protein, 9 aa, Artificial Sequence
  Description of Artificial Sequence: Synthetic peptide
ILHNGAYSL

SEQ ID NO: 651 - protein, 9 aa, Artificial Sequence
  Description of Artificial Sequence: Synthetic peptide
RLLQETELV

SEQ ID NO: 652 - protein, 9 aa, Artificial Sequence
  Description of Artificial Sequence: Synthetic peptide
VVLGVVFGI

SEQ ID NO: 653 - protein, 10 aa, Artificial Sequence
  Description of Artificial Sequence: Synthetic peptide
YMIMVKCWMI

SEQ ID NO: 654 - protein, 9 aa, Artificial Sequence
  Description of Artificial Sequence: Synthetic peptide
HLYQGCQVV

SEQ ID NO: 655 - protein, 10 aa, Artificial Sequence
  Description of Artificial Sequence: Synthetic peptide
YLVPQQGFFC

SEQ ID NO: 656 - protein, 9 aa, Artificial Sequence
  Description of Artificial Sequence: Synthetic peptide
PLQPEQLQV

SEQ ID NO: 657 - protein, 9 aa, Artificial Sequence
  Description of Artificial Sequence: Synthetic peptide
TLEEITGYL

SEQ ID NO: 658 - protein, 9 aa, Artificial Sequence
  Description of Artificial Sequence: Synthetic peptide
ALIHHNTHL

SEQ ID NO: 659 - protein, 9 aa, Artificial Sequence
  Description of Artificial Sequence: Synthetic peptide
PLTSIISAV

SEQ ID NO: 660 - protein, 9 aa, Artificial Sequence
  Description of Artificial Sequence: Synthetic peptide
KLFGSLAFV

SEQ ID NO: 661 - protein, 9 aa, Artificial Sequence
  Description of Artificial Sequence: Synthetic peptide
ITDFGLARL

SEQ ID NO: 662 - protein, 9 aa, Artificial Sequence
  Description of Artificial Sequence: Synthetic peptide
KVFGSLAFV

SEQ ID NO: 663 - protein, 9 aa, Artificial Sequence
  Description of Artificial Sequence: Synthetic peptide
AVVGILLVV

SEQ ID NO: 664 - protein, 9 aa, Artificial Sequence
  Description of Artificial Sequence: Synthetic peptide
QLFEDNYAL

SEQ ID NO: 665 - protein, 9 aa, Artificial Sequence
  Description of Artificial Sequence: Synthetic peptide
QIAKGMSYL

SEQ ID NO: 666 - protein, 10 aa, Artificial Sequence
  Description of Artificial Sequence: Synthetic peptide
LIAHNQVRQV

SEQ ID NO: 667 - protein, 9 aa, Artificial Sequence
  Description of Artificial Sequence: Synthetic peptide
VLRENTSPK

SEQ ID NO: 668 - protein, 9 aa, Artificial Sequence
  Description of Artificial Sequence: Synthetic peptide
TYLPTNASL

SEQ ID NO: 669 - protein, 9 aa, Artificial Sequence
  Description of Artificial Sequence: Synthetic peptide
RYAMTVWYF

SEQ ID NO: 670 - protein, 9 aa, Artificial Sequence
  Description of Artificial Sequence: Synthetic peptide
FLLGLIFLL

SEQ ID NO: 671 - protein, 9 aa, Artificial Sequence
  Description of Artificial Sequence: Synthetic peptide
LLLGIGILV

SEQ ID NO: 672 - protein, 10 aa, Artificial Sequence
  Description of Artificial Sequence: Synthetic peptide
LLQLGYSGRL

SEQ ID NO: 673 - protein, 9 aa, Artificial Sequence
  Description of Artificial Sequence: Synthetic peptide
LLQLYSGRL

SEQ ID NO: 674 - protein, 9 aa, Artificial Sequence
  Description of Artificial Sequence: Synthetic peptide
SLLSGDWVL

SEQ ID NO: 675 - protein, 9 aa, Artificial Sequence
  Description of Artificial Sequence: Synthetic peptide
GLQLGVQAV

SEQ ID NO: 676 - protein, 9 aa, Artificial Sequence
  Description of Artificial Sequence: Synthetic peptide
PLTEYIQPV

SEQ ID NO: 677 - protein, 8 aa, Artificial Sequence
  Description of Artificial Sequence: Synthetic peptide
APLLRWVL

SEQ ID NO: 678 - protein, 9 aa, Artificial Sequence
  Description of Artificial Sequence: Synthetic peptide
LLLLDVAPL

SEQ ID NO: 679 - protein, 9 aa, Artificial Sequence
  Description of Artificial Sequence: Synthetic peptide
LLDVAPLSL

SEQ ID NO: 680 - protein, 10 aa, Artificial Sequence
  Description of Artificial Sequence: Synthetic peptide
YSWMDISCWI

SEQ ID NO: 681 - protein, 9 aa, Artificial Sequence
  Description of Artificial Sequence: Synthetic peptide
SPRWWPTCL

SEQ ID NO: 682 - protein, 9 aa, Artificial Sequence
  Description of Artificial Sequence: Synthetic peptide
ALLEIASCL

SEQ ID NO: 683 - protein, 10 aa, Artificial Sequence
  Description of Artificial Sequence: Synthetic peptide
APAGRPSASR

SEQ ID NO: 684 - protein, 9 aa, Artificial Sequence
  Description of Artificial Sequence: Synthetic peptide
RSRRVLYPR

SEQ ID NO: 685 - protein, 9 aa, Artificial Sequence
  Description of Artificial Sequence: Synthetic peptide
APAGRPSAS

SEQ ID NO: 686 - protein, 9 aa, Artificial Sequence
  Description of Artificial Sequence: Synthetic peptide
VLYPRVVRR

SEQ ID NO: 687 - protein, 9 aa, Artificial Sequence
  Description of Artificial Sequence: Synthetic peptide
WLPFGFILI

SEQ ID NO: 688 - protein, 9 aa, Artificial Sequence
  Description of Artificial Sequence: Synthetic peptide
WYEGLDHAL

SEQ ID NO: 689 - protein, 9 aa, Artificial Sequence
  Description of Artificial Sequence: Synthetic peptide
ALMEQQHYV

SEQ ID NO: 690 - protein, 9 aa, Artificial Sequence
  Description of Artificial Sequence: Synthetic peptide
GVALQTMKQ

SEQ ID NO: 691 - protein, 9 aa, Artificial Sequence
  Description of Artificial Sequence: Synthetic peptide
FMNKFIYEI

SEQ ID NO: 692 - protein, 10 aa, Artificial Sequence
  Description of Artificial Sequence: Synthetic peptide
GLSPNLNRFL

SEQ ID NO: 693 - protein, 9 aa, Artificial Sequence
  Description of Artificial Sequence: Synthetic peptide
PLFQVPEPV

SEQ ID NO: 694 - protein, 9 aa, Artificial Sequence
  Description of Artificial Sequence: Synthetic peptide
ILLWAARYD

SEQ ID NO: 695 - protein, 9 aa, Artificial Sequence
  Description of Artificial Sequence: Synthetic peptide
EYSRRHPQL

SEQ ID NO: 696 - protein, 9 aa, Artificial Sequence
  Description of Artificial Sequence: Synthetic peptide
AYTKKAPQL

SEQ ID NO: 697 - protein, 9 aa, Artificial Sequence
  Description of Artificial Sequence: Synthetic peptide
EYYLQNAFL

SEQ ID NO: 698 - protein, 9 aa, Artificial Sequence
  Description of Artificial Sequence: Synthetic peptide
KYIQESQAL

SEQ ID NO: 699 - protein, 9 aa, Artificial Sequence
  Description of Artificial Sequence: Synthetic peptide
RSCGLFQKL

SEQ ID NO: 700 - protein, 10 aa, Artificial Sequence
  Description of Artificial Sequence: Synthetic peptide
QLAVSVILRV

SEQ ID NO: 701 - protein, 9 aa, Artificial Sequence
  Description of Artificial Sequence: Synthetic peptide
QLYALPCVL

SEQ ID NO: 702 - protein, 9 aa, Artificial Sequence
  Description of Artificial Sequence: Synthetic peptide
ALLNIKVKL

SEQ ID NO: 703 - protein, 9 aa, Artificial Sequence
  Description of Artificial Sequence: Synthetic peptide
FLGYLILGV

SEQ ID NO: 704 - protein, 15 aa, Artificial Sequence
  Description of Artificial Sequence: Synthetic peptide
SVSESDTIRSISIAS

SEQ ID NO: 705 - protein, 15 aa, Artificial Sequence
  Description of Artificial Sequence: Synthetic peptide
LLANGRMPTVLQCVN

SEQ ID NO: 706 - protein, 15 aa, Artificial Sequence
  Description of Artificial Sequence: Synthetic peptide
RMPTVLQCVNVSVVS

SEQ ID NO: 707 - protein, 9 aa, Artificial Sequence
  Description of Artificial Sequence: Synthetic peptide
LLSDDDVVV

SEQ ID NO: 708 - protein, 10 aa, Artificial Sequence
  Description of Artificial Sequence: Synthetic peptide
AQPDTAPLPV

SEQ ID NO: 709 - protein, 9 aa, Artificial Sequence
  Description of Artificial Sequence: Synthetic peptide
CIAEQYHTV

SEQ ID NO: 710 - protein, 9 aa, Artificial Sequence
  Description of Artificial Sequence: Synthetic peptide
ETVELQISL

SEQ ID NO: 711 - protein, 9 aa, Artificial Sequence
  Description of Artificial Sequence: Synthetic peptide
TLYEAVREV

SEQ ID NO: 712 - protein, 9 aa, Artificial Sequence
  Description of Artificial Sequence: Synthetic peptide
KLVERLGAA

SEQ ID NO: 713 - protein, 9 aa, Artificial Sequence
  Description of Artificial Sequence: Synthetic peptide
DVWSFGILL

SEQ ID NO: 714 - protein, 9 aa, Artificial Sequence
  Description of Artificial Sequence: Synthetic peptide
TFDYLRSVL

SEQ ID NO: 715 - protein, 9 aa, Artificial Sequence
  Description of Artificial Sequence: Synthetic peptide
HYTNASDGL

SEQ ID NO: 716 - protein, 10 aa, Artificial Sequence
  Description of Artificial Sequence: Synthetic peptide
DYLRSVLEDF

SEQ ID NO: 717 - protein, 10 aa, Artificial Sequence
  Description of Artificial Sequence: Synthetic peptide
QLCPICRAPV

SEQ ID NO: 718 - protein, 10 aa, Artificial Sequence
  Description of Artificial Sequence: Synthetic peptide
RLASFYDWLP

SEQ ID NO: 719 - protein, 9 aa, Artificial Sequence
  Description of Artificial Sequence: Synthetic peptide
SLGSPVLGL

SEQ ID NO: 720 - protein, 9 aa, Artificial Sequence
  Description of Artificial Sequence: Synthetic peptide
GPRESRPPA

SEQ ID NO: 721 - protein, 10 aa, Artificial Sequence
  Description of Artificial Sequence: Synthetic peptide
FLPEFGISSA

SEQ ID NO: 722 - protein, 9 aa, Artificial Sequence
  Description of Artificial Sequence: Synthetic peptide
RIDITLSSV

SEQ ID NO: 723 - protein, 10 aa, Artificial Sequence
  Description of Artificial Sequence: Synthetic peptide
GYCASLFAIL

SEQ ID NO: 724 - protein, 14 aa, Artificial Sequence
  Description of Artificial Sequence: Synthetic peptide
LPAVVGLSPGEQEY

SEQ ID NO: 725 - protein, 16 aa, Artificial Sequence
  Description of Artificial Sequence: Synthetic peptide
VGQDVSVLFRVTGALQ

SEQ ID NO: 726 - protein, 8 aa, Artificial Sequence
  Description of Artificial Sequence: Synthetic peptide
VLFYLGQY

SEQ ID NO: 727 - protein, 8 aa, Artificial Sequence
  Description of Artificial Sequence: Synthetic peptide
LLGDLFGV

SEQ ID NO: 728 - protein, 9 aa, Artificial Sequence
  Description of Artificial Sequence: Synthetic peptide
TLNDECWPA

SEQ ID NO: 729 - protein, 14 aa, Artificial Sequence
  Description of Artificial Sequence: Synthetic peptide
ERISSTLNDECWPA

SEQ ID NO: 730 - protein, 13 aa, Artificial Sequence
  Description of Artificial Sequence: Synthetic peptide
TSREQFLPSEGAA

SEQ ID NO: 731 - protein, 14 aa, Artificial Sequence
  Description of Artificial Sequence: Synthetic peptide
CPPWHPSERISSTL

SEQ ID NO: 732 - protein, 9 aa, Artificial Sequence
  Description of Artificial Sequence: Synthetic peptide
RLPPKPPLA

SEQ ID NO: 733 - protein, 9 aa, Artificial Sequence
  Description of Artificial Sequence: Synthetic peptide
RCPPKPPLA

SEQ ID NO: 734 - protein, 9 aa, Artificial Sequence
  Description of Artificial Sequence: Synthetic peptide
TLKCDCEIL

SEQ ID NO: 735 - protein, 9 aa, Artificial Sequence
  Description of Artificial Sequence: Synthetic peptide
RLGPTLMCL

SEQ ID NO: 736 - protein, 9 aa, Artificial Sequence
  Description of Artificial Sequence: Synthetic peptide
LLLEAVPAV

SEQ ID NO: 737 - protein, 9 aa, Artificial Sequence
  Description of Artificial Sequence: Synthetic peptide
WLPKILGEV

SEQ ID NO: 738 - protein, 9 aa, Artificial Sequence
  Description of Artificial Sequence: Synthetic peptide
VLSVNVPDV

SEQ ID NO: 739 - protein, 9 aa, Artificial Sequence
  Description of Artificial Sequence: Synthetic peptide
CMHLLLEAV

SEQ ID NO: 740 - protein, 9 aa, Artificial Sequence
  Description of Artificial Sequence: Synthetic peptide
ALLALTSAV

SEQ ID NO: 741 - protein, 9 aa, Artificial Sequence
  Description of Artificial Sequence: Synthetic peptide
AQCQETIRV

SEQ ID NO: 742 - protein, 15 aa, Artificial Sequence
  Description of Artificial Sequence: Synthetic peptide
LTLLALLALTSAVAK

SEQ ID NO: 743 - protein, 10 aa, Artificial Sequence
  Description of Artificial Sequence: Synthetic peptide
GLPPDVQRVH

SEQ ID NO: 744 - protein, 12 aa, Artificial Sequence
  Description of Artificial Sequence: Synthetic peptide
SLFPNSPKWTSK

SEQ ID NO: 745 - protein, 9 aa, Artificial Sequence
  Description of Artificial Sequence: Synthetic peptide
QLLIKAVNL

SEQ ID NO: 746 - protein, 9 aa, Artificial Sequence
  Description of Artificial Sequence: Synthetic peptide
STLCQVEPV

SEQ ID NO: 747 - protein, 9 aa, Artificial Sequence
  Description of Artificial Sequence: Synthetic peptide
AYVPQQAWI

SEQ ID NO: 748 - protein, 9 aa, Artificial Sequence
  Description of Artificial Sequence: Synthetic peptide
VYSDADIFL

SEQ ID NO: 749 - protein, 10 aa, Artificial Sequence
  Description of Artificial Sequence: Synthetic peptide
NYSVRYRPGL

SEQ ID NO: 750 - protein, 9 aa, Artificial Sequence
  Description of Artificial Sequence: Synthetic peptide
LYAWEPSFL

SEQ ID NO: 751 - protein, 9 aa, Artificial Sequence
  Description of Artificial Sequence: Synthetic peptide
STAPPVHNV

SEQ ID NO: 752 - protein, 9 aa, Artificial Sequence
  Description of Artificial Sequence: Synthetic peptide
LLLLTVLTV

SEQ ID NO: 753 - protein, 9 aa, Artificial Sequence
  Description of Artificial Sequence: Synthetic peptide
STAPPAHGV

SEQ ID NO: 754 - protein, 9 aa, Artificial Sequence
  Description of Artificial Sequence: Synthetic peptide
DVTSAPDNK

SEQ ID NO: 755 - protein, 9 aa, Artificial Sequence
  Description of Artificial Sequence: Synthetic peptide
VPGWGIALL

SEQ ID NO: 756 - protein, 10 aa, Artificial Sequence
  Description of Artificial Sequence: Synthetic peptide
DPSTDYYQEL

SEQ ID NO: 757 - protein, 9 aa, Artificial Sequence
  Description of Artificial Sequence: Synthetic peptide
TEAASRYNL

SEQ ID NO: 758 - protein, 12 aa, Artificial Sequence
  Description of Artificial Sequence: Synthetic peptide
PGSTAPPAHGVT

SEQ ID NO: 759 - protein, 9 aa, Artificial Sequence
  Description of Artificial Sequence: Synthetic peptide
TCQPTCRSL

SEQ ID NO: 760 - protein, 10 aa, Artificial Sequence
  Description of Artificial Sequence: Synthetic peptide
GCELKADKDY

SEQ ID NO: 761 - protein, 9 aa, Artificial Sequence
  Description of Artificial Sequence: Synthetic peptide
AYGLDFYIL

SEQ ID NO: 762 - protein, 9 aa, Artificial Sequence
  Description of Artificial Sequence: Synthetic peptide
LLGRNSFEV

SEQ ID NO: 763 - protein, 9 aa, Artificial Sequence
  Description of Artificial Sequence: Synthetic peptide
RMPEAAPPV

SEQ ID NO: 764 - protein, 11 aa, Artificial Sequence
  Description of Artificial Sequence: Synthetic peptide
LLPENNVLSPV

SEQ ID NO: 765 - protein, 9 aa, Artificial Sequence
  Description of Artificial Sequence: Synthetic peptide
SLPPPGTRV

SEQ ID NO: 766 - protein, 9 aa, Artificial Sequence
  Description of Artificial Sequence: Synthetic peptide
YLGSYGFRL

SEQ ID NO: 767 - protein, 9 aa, Artificial Sequence
  Description of Artificial Sequence: Synthetic peptide
SMPPPGTRV

SEQ ID NO: 768 - protein, 11 aa, Artificial Sequence
  Description of Artificial Sequence: Synthetic peptide
GLAPPQHLIRV

SEQ ID NO: 769 - protein, 9 aa, Artificial Sequence
  Description of Artificial Sequence: Synthetic peptide
KLCPVQLWV

SEQ ID NO: 770 - protein, 9 aa, Artificial Sequence
  Description of Artificial Sequence: Synthetic peptide
KTCPVQLWV

SEQ ID NO: 771 - protein, 9 aa, Artificial Sequence
  Description of Artificial Sequence: Synthetic peptide
AIYKQSQHM

SEQ ID NO: 772 - protein, 9 aa, Artificial Sequence
  Description of Artificial Sequence: Synthetic peptide
SQKTYQGSY

SEQ ID NO: 773 - protein, 9 aa, Artificial Sequence
  Description of Artificial Sequence: Synthetic peptide
TRVLAMAIY

SEQ ID NO: 774 - protein, 13 aa, Artificial Sequence
  Description of Artificial Sequence: Synthetic peptide
PGTRVRAMAIYKQ

SEQ ID NO: 775 - protein, 12 aa, Artificial Sequence
  Description of Artificial Sequence: Synthetic peptide
HLIRVEGNLRVE

SEQ ID NO: 776 - protein, 9 aa, Artificial Sequence
  Description of Artificial Sequence: Synthetic peptide
KLAKPLSSL

SEQ ID NO: 777 - protein, 9 aa, Artificial Sequence
  Description of Artificial Sequence: Synthetic peptide
VLLGMEGSV

SEQ ID NO: 778 - protein, 9 aa, Artificial Sequence
  Description of Artificial Sequence: Synthetic peptide
ALPSFQIPV

SEQ ID NO: 779 - protein, 9 aa, Artificial Sequence
  Description of Artificial Sequence: Synthetic peptide
QLMAFNHLV

SEQ ID NO: 780 - protein, 9 aa, Artificial Sequence
  Description of Artificial Sequence: Synthetic peptide
TLPGYPPHV

SEQ ID NO: 781 - protein, 12 aa, Artificial Sequence
  Description of Artificial Sequence: Synthetic peptide
CTACRWKKACQR

SEQ ID NO: 782 - protein, 9 aa, Artificial Sequence
  Description of Artificial Sequence: Synthetic peptide
IIGGGMAFT

SEQ ID NO: 783 - protein, 9 aa, Artificial Sequence
  Description of Artificial Sequence: Synthetic peptide
VLDGLDVLL

SEQ ID NO: 784 - protein, 10 aa, Artificial Sequence
  Description of Artificial Sequence: Synthetic peptide
SLYSFPEPEA

SEQ ID NO: 785 - protein, 10 aa, Artificial Sequence
  Description of Artificial Sequence: Synthetic peptide
ALYVDSLFFL

SEQ ID NO: 786 - protein, 9 aa, Artificial Sequence
  Description of Artificial Sequence: Synthetic peptide
SLLQHLIGL

SEQ ID NO: 787 - protein, 10 aa, Artificial Sequence
  Description of Artificial Sequence: Synthetic peptide
LYVDSLFFLC

SEQ ID NO: 788 - protein, 9 aa, Artificial Sequence
  Description of Artificial Sequence: Synthetic peptide
GQHLHLETF

SEQ ID NO: 789 - protein, 10 aa, Artificial Sequence
  Description of Artificial Sequence: Synthetic peptide
FGLFPRLCPV

SEQ ID NO: 790 - protein, 9 aa, Artificial Sequence
  Description of Artificial Sequence: Synthetic peptide
ILLWQPIPV

SEQ ID NO: 791 - protein, 9 aa, Artificial Sequence
  Description of Artificial Sequence: Synthetic peptide
YLPFRNCRP

SEQ ID NO: 792 - protein, 10 aa, Artificial Sequence
  Description of Artificial Sequence: Synthetic peptide
HSTNGVTRIY

SEQ ID NO: 793 - protein, 9 aa, Artificial Sequence
  Description of Artificial Sequence: Synthetic peptide
VLAGGFFLL

SEQ ID NO: 794 - protein, 9 aa, Artificial Sequence
  Description of Artificial Sequence: Synthetic peptide
LYSDPADYF

SEQ ID NO: 795 - protein, 9 aa, Artificial Sequence
  Description of Artificial Sequence: Synthetic peptide
NYARTEDFF

SEQ ID NO: 796 - protein, 9 aa, Artificial Sequence
  Description of Artificial Sequence: Synthetic peptide
LKLSGVVRL

SEQ ID NO: 797 - protein, 11 aa, Artificial Sequence
  Description of Artificial Sequence: Synthetic peptide
PLPPARNGGLG

SEQ ID NO: 798 - protein, 10 aa, Artificial Sequence
  Description of Artificial Sequence: Synthetic peptide
SPSSNRIRNT

SEQ ID NO: 799 - protein, 9 aa, Artificial Sequence
  Description of Artificial Sequence: Synthetic peptide
YMFDVTSRV

SEQ ID NO: 800 - protein, 9 aa, Artificial Sequence
  Description of Artificial Sequence: Synthetic peptide
IMFDVTSRV

SEQ ID NO: 801 - protein, 9 aa, Artificial Sequence
  Description of Artificial Sequence: Synthetic peptide
HPLVFHTNR

SEQ ID NO: 802 - protein, 9 aa, Artificial Sequence
  Description of Artificial Sequence: Synthetic peptide
IIMFDVTSR

SEQ ID NO: 803 - protein, 9 aa, Artificial Sequence
  Description of Artificial Sequence: Synthetic peptide
LAALPHSCL

SEQ ID NO: 804 - protein, 10 aa, Artificial Sequence
  Description of Artificial Sequence: Synthetic peptide
GLASFKSFLK

SEQ ID NO: 805 - protein, 9 aa, Artificial Sequence
  Description of Artificial Sequence: Synthetic peptide
MAQKRIHAL

SEQ ID NO: 806 - protein, 9 aa, Artificial Sequence
  Description of Artificial Sequence: Synthetic peptide
KNKRILMEH

SEQ ID NO: 807 - protein, 10 aa, Artificial Sequence
  Description of Artificial Sequence: Synthetic peptide
RAGLQVRKNK

SEQ ID NO: 808 - protein, 10 aa, Artificial Sequence
  Description of Artificial Sequence: Synthetic peptide
ALWPWLLMAT

SEQ ID NO: 809 - protein, 9 aa, Artificial Sequence
  Description of Artificial Sequence: Synthetic peptide
NSQPVWLCL

SEQ ID NO: 810 - protein, 9 aa, Artificial Sequence
  Description of Artificial Sequence: Synthetic peptide
LPRWPPPQL

SEQ ID NO: 811 - protein, 9 aa, Artificial Sequence
  Description of Artificial Sequence: Synthetic peptide
DYSARWNEI

SEQ ID NO: 812 - protein, 9 aa, Artificial Sequence
  Description of Artificial Sequence: Synthetic peptide
AYDFLYNYL

SEQ ID NO: 813 - protein, 9 aa, Artificial Sequence
  Description of Artificial Sequence: Synthetic peptide
SYTRLFLIL

SEQ ID NO: 814 - protein, 9 aa, Artificial Sequence
  Description of Artificial Sequence: Synthetic peptide
KMDAEHPEL

SEQ ID NO: 815 - protein, 9 aa, Artificial Sequence
  Description of Artificial Sequence: Synthetic peptide
FLTPLRNFL

SEQ ID NO: 816 - protein, 9 aa, Artificial Sequence
  Description of Artificial Sequence: Synthetic peptide
AWISKPPGV

SEQ ID NO: 817 - protein, 10 aa, Artificial Sequence
  Description of Artificial Sequence: Synthetic peptide
SAWISKPPGV

SEQ ID NO: 818 - protein, 10 aa, Artificial Sequence
  Description of Artificial Sequence: Synthetic peptide
MYIFPVHWQF

SEQ ID NO: 819 - protein, 9 aa, Artificial Sequence
  Description of Artificial Sequence: Synthetic peptide
DYIGPCKYI

SEQ ID NO: 820 - protein, 9 aa, Artificial Sequence
  Description of Artificial Sequence: Synthetic peptide
KLQELNYNL

SEQ ID NO: 821 - protein, 9 aa, Artificial Sequence
  Description of Artificial Sequence: Synthetic peptide
MIAVFLPIV

SEQ ID NO: 822 - protein, 9 aa, Artificial Sequence
  Description of Artificial Sequence: Synthetic peptide
FLYTLLREV

SEQ ID NO: 823 - protein, 9 aa, Artificial Sequence
  Description of Artificial Sequence: Synthetic peptide
LLLGTIHAL

SEQ ID NO: 824 - protein, 15 aa, Artificial Sequence
  Description of Artificial Sequence: Synthetic peptide
HQQYFYKIPILVINK

SEQ ID NO: 825 - protein, 10 aa, Artificial Sequence
  Description of Artificial Sequence: Synthetic peptide
ELTLGEFLKL

SEQ ID NO: 826 - protein, 9 aa, Artificial Sequence
  Description of Artificial Sequence: Synthetic peptide
QMFFCFKEL

SEQ ID NO: 827 - protein, 9 aa, Artificial Sequence
  Description of Artificial Sequence: Synthetic peptide
LMLGEFLKL

SEQ ID NO: 828 - protein, 10 aa, Artificial Sequence
  Description of Artificial Sequence: Synthetic peptide
TLPPAWQPFL

SEQ ID NO: 829 - protein, 15 aa, Artificial Sequence
  Description of Artificial Sequence: Synthetic peptide
TLGEFLKLDRERAKN

SEQ ID NO: 830 - protein, 9 aa, Artificial Sequence
  Description of Artificial Sequence: Synthetic peptide
AYACNTSTL

SEQ ID NO: 831 - protein, 9 aa, Artificial Sequence
  Description of Artificial Sequence: Synthetic peptide
ILAKFLHWL

SEQ ID NO: 832 - protein, 9 aa, Artificial Sequence
  Description of Artificial Sequence: Synthetic peptide
RLVDDFLLV

SEQ ID NO: 833 - protein, 9 aa, Artificial Sequence
  Description of Artificial Sequence: Synthetic peptide
LLTSRLRFI

SEQ ID NO: 834 - protein, 9 aa, Artificial Sequence
  Description of Artificial Sequence: Synthetic peptide
RLFFYRKSV

SEQ ID NO: 835 - protein, 9 aa, Artificial Sequence
  Description of Artificial Sequence: Synthetic peptide
KLFGVLRLK

SEQ ID NO: 836 - protein, 15 aa, Artificial Sequence
  Description of Artificial Sequence: Synthetic peptide
RPGLLGASVLGLDDI

SEQ ID NO: 837 - protein, 15 aa, Artificial Sequence
  Description of Artificial Sequence: Synthetic peptide
LTDLQPYMRQFVAHL

SEQ ID NO: 838 - protein, 9 aa, Artificial Sequence
  Description of Artificial Sequence: Synthetic peptide
FLPATLTMV

SEQ ID NO: 839 - protein, 9 aa, Artificial Sequence
  Description of Artificial Sequence: Synthetic peptide
FLYDDNQRV

SEQ ID NO: 840 - protein, 9 aa, Artificial Sequence
  Description of Artificial Sequence: Synthetic peptide
YQLCLTNIF

SEQ ID NO: 841 - protein, 10 aa, Artificial Sequence
  Description of Artificial Sequence: Synthetic peptide
LMALPPCHAL

SEQ ID NO: 842 - protein, 9 aa, Artificial Sequence
  Description of Artificial Sequence: Synthetic peptide
SRFGGAVVR

SEQ ID NO: 843 - protein, 10 aa, Artificial Sequence
  Description of Artificial Sequence: Synthetic peptide
FLSTLTIDGV

SEQ ID NO: 844 - protein, 9 aa, Artificial Sequence
  Description of Artificial Sequence: Synthetic peptide
ASLDSDPWV

SEQ ID NO: 845 - protein, 9 aa, Artificial Sequence
  Description of Artificial Sequence: Synthetic peptide
DLLSHAFFA

SEQ ID NO: 846 - protein, 11 aa, Artificial Sequence
  Description of Artificial Sequence: Synthetic peptide
TSEKRPFMCAY

SEQ ID NO: 847 - protein, 9 aa, Artificial Sequence
  Description of Artificial Sequence: Synthetic peptide
RMFPNAPYL

SEQ ID NO: 848 - protein, 9 aa, Artificial Sequence
  Description of Artificial Sequence: Synthetic peptide
YMFPNAPYL

SEQ ID NO: 849 - protein, 9 aa, Artificial Sequence
  Description of Artificial Sequence: Synthetic peptide
CMTWNQMNL

SEQ ID NO: 850 - protein, 9 aa, Artificial Sequence
  Description of Artificial Sequence: Synthetic peptide
CYTWNQMNL

SEQ ID NO: 851 - protein, 9 aa, Artificial Sequence
  Description of Artificial Sequence: Synthetic peptide
RWPSCQKKF

SEQ ID NO: 852 - protein, 11 aa, Artificial Sequence
  Description of Artificial Sequence: Synthetic peptide
LSHLQMHSRKH

SEQ ID NO: 853 - protein, 16 aa, Artificial Sequence
  Description of Artificial Sequence: Synthetic peptide
KRYFKLSHLQMHSRKH

SEQ ID NO: 854 - protein, 9 aa, Artificial Sequence
  Description of Artificial Sequence: Synthetic peptide
LLSGQPASA

SEQ ID NO: 855 - protein, 10 aa, Artificial Sequence
  Description of Artificial Sequence: Synthetic peptide
NVLHFFNAPL

SEQ ID NO: 856 - protein, 9 aa, Artificial Sequence
  Description of Artificial Sequence: Synthetic peptide
KLPNSVLGR

SEQ ID NO: 857 - protein, 10 aa, Artificial Sequence
  Description of Artificial Sequence: Synthetic peptide
RVAALARDAP

SEQ ID NO: 858 - protein, 9 aa, Artificial Sequence
  Description of Artificial Sequence: Synthetic peptide
LLVLLYSKL

SEQ ID NO: 859 - protein, 9 aa, Artificial Sequence
  Description of Artificial Sequence: Synthetic peptide
YLMDTSGKV

SEQ ID NO: 860 - protein, 9 aa, Artificial Sequence
  Description of Artificial Sequence: Synthetic peptide
VPYGSFKHV

SEQ ID NO: 861 - protein, 10 aa, Artificial Sequence
  Description of Artificial Sequence: Synthetic peptide
RLYPWGVVEV

SEQ ID NO: 862 - protein, 9 aa, Artificial Sequence
  Description of Artificial Sequence: Synthetic peptide
CHILLGNYC

SEQ ID NO: 863 - protein, 21 aa, Artificial Sequence
  Description of Artificial Sequence: Synthetic peptide
MEVGWYRSPFSRVVHLYRNGK

SEQ ID NO: 864 - protein, 9 aa, Artificial Sequence
  Description of Artificial Sequence: Synthetic peptide
FLYALALLL

SEQ ID NO: 865 - protein, 9 aa, Artificial Sequence
  Description of Artificial Sequence: Synthetic peptide
YVLDHLIVV

SEQ ID NO: 866 - protein, 10 aa, Artificial Sequence
  Description of Artificial Sequence: Synthetic peptide
AVFDRKSDAK

SEQ ID NO: 867 - protein, 9 aa, Artificial Sequence
  Description of Artificial Sequence: Synthetic peptide
RPPIFIRLL

SEQ ID NO: 868 - protein, 9 aa, Artificial Sequence
  Description of Artificial Sequence: Synthetic peptide
VLQWASLAV

SEQ ID NO: 869 - protein, 9 aa, Artificial Sequence
  Description of Artificial Sequence: Synthetic peptide
FMVFLQTHI

SEQ ID NO: 870 - protein, 10 aa, Artificial Sequence
  Description of Artificial Sequence: Synthetic peptide
FLQTHIFAEV

SEQ ID NO: 871 - protein, 10 aa, Artificial Sequence
  Description of Artificial Sequence: Synthetic peptide
SIVCYFMVFL

SEQ ID NO: 872 - protein, 11 aa, Artificial Sequence
  Description of Artificial Sequence: Synthetic peptide
YSEHPTFTSQY

SEQ ID NO: 873 - protein, 9 aa, Artificial Sequence
  Description of Artificial Sequence: Synthetic peptide
VTEHDTLLY

SEQ ID NO: 874 - protein, 9 aa, Artificial Sequence
  Description of Artificial Sequence: Synthetic peptide
VLEETSVML

SEQ ID NO: 875 - protein, 11 aa, Artificial Sequence
  Description of Artificial Sequence: Synthetic peptide
TTVYPPSSTAK

SEQ ID NO: 876 - protein, 9 aa, Artificial Sequence
  Description of Artificial Sequence: Synthetic peptide
GPISGHVLK

SEQ ID NO: 877 - protein, 10 aa, Artificial Sequence
  Description of Artificial Sequence: Synthetic peptide
TPRVTGGGAM

SEQ ID NO: 878 - protein, 10 aa, Artificial Sequence
  Description of Artificial Sequence: Synthetic peptide
RPHERNGFTV

SEQ ID NO: 879 - protein, 9 aa, Artificial Sequence
  Description of Artificial Sequence: Synthetic peptide
VSDGGPNLY

SEQ ID NO: 880 - protein, 9 aa, Artificial Sequence
  Description of Artificial Sequence: Synthetic peptide
GILGFVFTL

SEQ ID NO: 881 - protein, 5 aa, Artificial Sequence
  Description of Artificial Sequence: Synthetic peptide
IPKTG

SEQ ID NO: 882 - protein, 5 aa, Artificial Sequence
  Description of Artificial Sequence: Synthetic peptide
  MOD_RES (3)..(3): Any amino acid
MPXTG

SEQ ID NO: 883 - protein, 5 aa, Artificial Sequence
  Description of Artificial Sequence: Synthetic peptide
LAETG

SEQ ID NO: 884 - protein, 5 aa, Artificial Sequence
  Description of Artificial Sequence: Synthetic peptide
  MOD_RES (3)..(3): Any amino acid
LPXAG

SEQ ID NO: 885 - protein, 5 aa, Artificial Sequence
  Description of Artificial Sequence: Synthetic peptide
LPESG

SEQ ID NO: 886 - protein, 5 aa, Artificial Sequence
  Description of Artificial Sequence: Synthetic peptide
LPELG

SEQ ID NO: 887 - protein, 5 aa, Artificial Sequence
  Description of Artificial Sequence: Synthetic peptide
LPEVG

SEQ ID NO: 888 - protein, 206 aa, Staphylococcus aureus
MKKWTNRLMTIAGVVLILVAAYLFAKPHIDNYLHDKDKDEKIEQYDKNVKEQASKDNKQQAKPQIPKDKSKVAGYIEIPDADIKEPVYPGPATPEQLNRGVSFAEENESLDDQNISIAGHTFIDRPNYQFTNLKAAKKGSMVYFKVGNETRKYKMTSIRDVKPTDVEVLDEQKGKDKQLTLITCDDYNEKTGVWEKRKIFVATEVK

SEQ ID NO: 889 - protein, 206 aa, Staphylococcus aureus
MKKWTNRLMTIAGVVLILVAAYLFAKPHIDNYLHDKDKDEKIEQYDKNVKEQASKDKKQQAKPQIPKDKSKVAGYIEIPDADIKEPVYPGPATPEQLNRGVSFAEENESLDDQNISIAGHTFIDRPNYQFTNLKAAKKGSMVYFKVGNETRKYKMTSIRDVKPTDVGVLDEQKGKDKQLTLITCDDYNEKTGVWEKRKIFVATEVK

SEQ ID NO: 890 - protein, 148 aa, Staphylococcus aureus
MQAKPQIPKDKSKVAGYIEIPDADIKEPVYPGPATREQLNRGVSFAEENESLDDQNISIAGHTFIDRPNYQFTNLKAAKKGSMVYFKVGNETRKYKMTSIRNVKPTAVEVLDEQKGKDKQLTLITCDDYNEETGVWETRKIFVATEVK

SEQ ID NO: 891 - protein, 5 aa, Artificial Sequence
  Description of Artificial Sequence: Synthetic peptide
NPQTN

SEQ ID NO: 892 - protein, 5 aa, Artificial Sequence
  Description of Artificial Sequence: Synthetic peptide
NPKTG

SEQ ID NO: 893 - protein, 5 aa, Artificial Sequence
  Description of Artificial Sequence: Synthetic peptide
NSKTA

SEQ ID NO: 894 - protein, 5 aa, Artificial Sequence
  Description of Artificial Sequence: Synthetic peptide
NPQTG

SEQ ID NO: 895 - protein, 5 aa, Artificial Sequence
  Description of Artificial Sequence: Synthetic peptide
NAKTN

SEQ ID NO: 896 - protein, 5 aa, Artificial Sequence
  Description of Artificial Sequence: Synthetic peptide
NPQSS

SEQ ID NO: 897 - protein, 5 aa, Artificial Sequence
  Description of Artificial Sequence: Synthetic peptide
  MOD_RES (3)..(3): Glu, Ala, Ser or His
NAXTG

SEQ ID NO: 898 - protein, 5 aa, Artificial Sequence
  Description of Artificial Sequence: Synthetic peptide
  MOD_RES (3)..(3): Any amino acid
LAXTG

SEQ ID NO: 899 - protein, 5 aa, Artificial Sequence
  Description of Artificial Sequence: Synthetic peptide
LPKTG

SEQ ID NO: 900 - protein, 5 aa, Artificial Sequence
  Description of Artificial Sequence: Synthetic peptide
LPITG

SEQ ID NO: 901 - protein, 5 aa, Artificial Sequence
  Description of Artificial Sequence: Synthetic peptide
LPDTA

SEQ ID NO: 902 - protein, 5 aa, Artificial Sequence
  Description of Artificial Sequence: Synthetic peptide
SPKTG

SEQ ID NO: 903 - protein, 5 aa, Artificial Sequence
  Description of Artificial Sequence: Synthetic peptide
LAATG

SEQ ID NO: 904 - protein, 5 aa, Artificial Sequence
  Description of Artificial Sequence: Synthetic peptide
LAHTG

SEQ ID NO: 905 - protein, 5 aa, Artificial Sequence
  Description of Artificial Sequence: Synthetic peptide
LASTG

SEQ ID NO: 906 - protein, 5 aa, Artificial Sequence
  Description of Artificial Sequence: Synthetic peptide
LPLTG

SEQ ID NO: 907 - protein, 5 aa, Artificial Sequence
  Description of Artificial Sequence: Synthetic peptide
LSRTG

SEQ ID NO: 908 - protein, 5 aa, Artificial Sequence
  Description of Artificial Sequence: Synthetic peptide
LPETG

SEQ ID NO: 909 - protein, 5 aa, Artificial Sequence
  Description of Artificial Sequence: Synthetic peptide
VPDTG

SEQ ID NO: 910 - protein, 5 aa, Artificial Sequence
  Description of Artificial Sequence: Synthetic peptide
IPQTG

SEQ ID NO: 911 - protein, 5 aa, Artificial Sequence
  Description of Artificial Sequence: Synthetic peptide
YPRRG

SEQ ID NO: 912 - protein, 5 aa, Artificial Sequence
  Description of Artificial Sequence: Synthetic peptide
LPMTG

SEQ ID NO: 913 - protein, 5 aa, Artificial Sequence
  Description of Artificial Sequence: Synthetic peptide
LAFTG

SEQ ID NO: 914 - protein, 5 aa, Artificial Sequence
  Description of Artificial Sequence: Synthetic peptide
LPQTS

SEQ ID NO: 915 - protein, 4 aa, Artificial Sequence
  Description of Artificial Sequence: Synthetic peptide
NPQS

SEQ ID NO: 916 - protein, 4 aa, Artificial Sequence
  Description of Artificial Sequence: Synthetic peptide
LPST

SEQ ID NO: 917 - protein, 4 aa, Artificial Sequence
  Description of Artificial Sequence: Synthetic peptide
NSKT

SEQ ID NO: 918 - protein, 4 aa, Artificial Sequence
  Description of Artificial Sequence: Synthetic peptide
NPQT

SEQ ID NO: 919 - protein, 4 aa, Artificial Sequence
  Description of Artificial Sequence: Synthetic peptide
NAKT

SEQ ID NO: 920 - protein, 4 aa, Artificial Sequence
  Description of Artificial Sequence: Synthetic peptide
LPIT

SEQ ID NO: 921 - protein, 4 aa, Artificial Sequence
  Description of Artificial Sequence: Synthetic peptide
LAET

SEQ ID NO: 922 - protein, 314 aa, Homo sapiens; identical to SEQ ID NO: 137

SEQ ID NO: 923 - protein, 5 aa, Artificial Sequence
  Description of Artificial Sequence: Synthetic peptide
LPATG

SEQ ID NO: 924 - protein, 5 aa, Artificial Sequence
  Description of Artificial Sequence: Synthetic peptide
LPNTG

SEQ ID NO: 925 - protein, 5 aa, Artificial Sequence
  Description of Artificial Sequence: Synthetic peptide
LPNAG

SEQ ID NO: 926 - protein, 5 aa, Artificial Sequence
  Description of Artificial Sequence: Synthetic peptide
LPNTA

SEQ ID NO: 927 - protein, 5 aa, Artificial Sequence
  Description of Artificial Sequence: Synthetic peptide
  MOD_RES (3)..(3): Any amino acid
LGXTG

SEQ ID NO: 928 - protein, 5 aa, Artificial Sequence
  Description of Artificial Sequence: Synthetic peptide
LGATG

SEQ ID NO: 929 - protein, 5 aa, Artificial Sequence
  Description of Artificial Sequence: Synthetic peptide
  MOD_RES (3)..(3): Any amino acid
IPXTG

SEQ ID NO: 930 - protein, 5 aa, Artificial Sequence
  Description of Artificial Sequence: Synthetic peptide
IPNTG

SEQ ID NO: 931 - protein, 5 aa, Artificial Sequence
  Description of Artificial Sequence: Synthetic peptide
IPETG

SEQ ID NO: 932 - protein, 9 aa, Artificial Sequence
  Description of Artificial Sequence: Synthetic peptide
YEMFNDKSF

SEQ ID NO: 933 - protein, 11 aa, Artificial Sequence
  Description of Artificial Sequence: Synthetic peptide
  MOD_RES (3)..(3): Pyrrolysine
  MOD_RES (11)..(11): Ile or Leu
HRXEIFSHDFX

SEQ ID NO: 934 - protein, 10 aa, Artificial Sequence
  Description of Artificial Sequence: Synthetic peptide
  MOD_RES (2)..(2): Ile or Leu
  MOD_RES (5)..(5): Ile or Leu
  MOD_RES (7)..(7): Pyrrolysine
FXIEXFXESS

SEQ ID NO: 935 - protein, 10 aa, Artificial Sequence
  Description of Artificial Sequence: Synthetic peptide
  MOD_RES (4)..(4): Pyrrolysine
NEIXREIREI

SEQ ID NO: 936 - protein, 15 aa, Artificial Sequence
  Description of Artificial Sequence: Synthetic peptide
  MOD_RES (1)..(1): Ile or Leu
  MOD_RES (11)..(11): Ile or Leu
  MOD_RES (15)..(15): Selenocysteine
XFKSIFEMMSXDSSX

SEQ ID NO: 937 - protein, 13 aa, Artificial Sequence
  Description of Artificial Sequence: Synthetic peptide
  MOD_RES (11)..(11): Pyrrolysine
KNFLENFIESXFI

SEQ ID NO: 938 - protein, 11 aa, Artificial Sequence
  Description of Artificial Sequence: Synthetic peptide
KIGDFGLATEK

SEQ ID NO: 939 - protein, 10 aa, Artificial Sequence
  Description of Artificial Sequence: Synthetic peptide
FGLATEKSRW

SEQ ID NO: 940 - protein, 9 aa, Artificial Sequence
  Description of Artificial Sequence: Synthetic peptide
ATEKSRWSG

SEQ ID NO: 941 - protein, 8 aa, Artificial Sequence
  Description of Artificial Sequence: Synthetic peptide
DFGLATEK

SEQ ID NO: 942 - protein, 9 aa, Artificial Sequence
  Description of Artificial Sequence: Synthetic peptide
EKSRWSGSH

SEQ ID NO: 943 - protein, 11 aa, Artificial Sequence
  Description of Artificial Sequence: Synthetic peptide
GDFGLATEKSR

SEQ ID NO: 944 - protein, 9 aa, Artificial Sequence
  Description of Artificial Sequence: Synthetic peptide
GLATEKSRW

SEQ ID NO: 945 - protein, 9 aa, Artificial Sequence
  Description of Artificial Sequence: Synthetic peptide
IGDFGLATE

SEQ ID NO: 946 - protein, 8 aa, Artificial Sequence
  Description of Artificial Sequence: Synthetic peptide
LATEKSRW

SEQ ID NO: 947 - protein, 8 aa, Artificial Sequence
  Description of Artificial Sequence: Synthetic peptide
TEKSRWSG

SEQ ID NO: 948 - protein, 9 aa, Artificial Sequence
  Description of Artificial Sequence: Synthetic peptide
ATMKSRWSG

SEQ ID NO: 949 - protein, 8 aa, Artificial Sequence
  Description of Artificial Sequence: Synthetic peptide
DFGLATMK

SEQ ID NO: 950 - protein, 9 aa, Artificial Sequence
  Description of Artificial Sequence: Synthetic peptide
DFGLATMKS

SEQ ID NO: 951 - protein, 8 aa, Artificial Sequence
  Description of Artificial Sequence: Synthetic peptide
FGLATMKS

SEQ ID NO: 952 - protein, 9 aa, Artificial Sequence
  Description of Artificial Sequence: Synthetic peptide
FGLATMKSR

SEQ ID NO: 953 - protein, 9 aa, Artificial Sequence
  Description of Artificial Sequence: Synthetic peptide
GDFGLATMK

SEQ ID NO: 954 - protein, 11 aa, Artificial Sequence
  Description of Artificial Sequence: Synthetic peptide
GDFGLATMKSR

SEQ ID NO: 955 - protein, 9 aa, Artificial Sequence
  Description of Artificial Sequence: Synthetic peptide
GLATMKSRW

SEQ ID NO: 956 - protein, 9 aa, Artificial Sequence
  Description of Artificial Sequence: Synthetic peptide
IGDFGLATM

SEQ ID NO: 957 - protein, 8 aa, Artificial Sequence
  Description of Artificial Sequence: Synthetic peptide
LATMKSRW

SEQ ID NO: 958 - protein, 9 aa, Artificial Sequence
  Description of Artificial Sequence: Synthetic peptide
LATMKSRWS

SEQ ID NO: 959 - protein, 9 aa, Artificial Sequence
  Description of Artificial Sequence: Synthetic peptide
MKSRWSGSH

SEQ ID NO: 960 - protein, 8 aa, Artificial Sequence
  Description of Artificial Sequence: Synthetic peptide
TMKSRWSG

SEQ ID NO: 961 - protein, 9 aa, Artificial Sequence
  Description of Artificial Sequence: Synthetic peptide
TMKSRWSGS

SEQ ID NO: 962 - protein, 10 aa, Artificial Sequence
  Description of Artificial Sequence: Synthetic peptide
TMKSRWSGSH

SEQ ID NO: 963 - protein, 9 aa, Artificial Sequence
  Description of Artificial Sequence: Synthetic peptide
EGKYSFGVT

SEQ ID NO: 964 - protein, 12 aa, Artificial Sequence
  Description of Artificial Sequence: Synthetic peptide
EGKYSFGVTCVK

SEQ ID NO: 965 - protein, 13 aa, Artificial Sequence
  Description of Artificial Sequence: Synthetic peptide
EGKYSFGVTCVKK

SEQ ID NO: 966 - protein, 9 aa, Artificial Sequence
  Description of Artificial Sequence: Synthetic peptide
FGVTCVKKC

SEQ ID NO: 967 - protein, 11 aa, Artificial Sequence
  Description of Artificial Sequence: Synthetic peptide
FGVTCVKKCPR

SEQ ID NO: 968 - protein, 9 aa, Artificial Sequence
  Description of Artificial Sequence: Synthetic peptide
GKYSFGVTC

SEQ ID NO: 969 - protein, 11 aa, Artificial Sequence
  Description of Artificial Sequence: Synthetic peptide
GKYSFGVTCVK

SEQ ID NO: 970 - protein, 12 aa, Artificial Sequence
  Description of Artificial Sequence: Synthetic peptide
GKYSFGVTCVKK

SEQ ID NO: 971 - protein, 9 aa, Artificial Sequence
  Description of Artificial Sequence: Synthetic peptide
GVTCVKKCP

SEQ ID NO: 972 - protein, 10 aa, Artificial Sequence
  Description of Artificial Sequence: Synthetic peptide
GVTCVKKCPR

SEQ ID NO: 973 - protein, 9 aa, Artificial Sequence
  Description of Artificial Sequence: Synthetic peptide
KYSFGVTCV

SEQ ID NO: 974 - protein, 10 aa, Artificial Sequence
  Description of Artificial Sequence: Synthetic peptide
KYSFGVTCVK

SEQ ID NO: 975 - protein, 11 aa, Artificial Sequence
  Description of Artificial Sequence: Synthetic peptide
KYSFGVTCVKK

SEQ ID NO: 976 - protein, 14 aa, Artificial Sequence
  Description of Artificial Sequence: Synthetic peptide
KYSFGVTCVKKCPR

SEQ ID NO: 977 - protein, 8 aa, Artificial Sequence
  Description of Artificial Sequence: Synthetic peptide
PEGKYSFG

SEQ ID NO: 978 - protein, 9 aa, Artificial Sequence
  Description of Artificial Sequence: Synthetic peptide
PEGKYSFGV

SEQ ID NO: 979 - protein, 13 aa, Artificial Sequence
  Description of Artificial Sequence: Synthetic peptide
PEGKYSFGVTCVK

SEQ ID NO: 980 - protein, 14 aa, Artificial Sequence
  Description of Artificial Sequence: Synthetic peptide
PEGKYSFGVTCVKK

SEQ ID NO: 981 - protein, 9 aa, Artificial Sequence
  Description of Artificial Sequence: Synthetic peptide
SFGVTCVKK

SEQ ID NO: 982 - protein, 12 aa, Artificial Sequence
  Description of Artificial Sequence: Synthetic peptide
SFGVTCVKKCPR

SEQ ID NO: 983 - protein, 8 aa, Artificial Sequence
  Description of Artificial Sequence: Synthetic peptide
TCVKKCPR

SEQ ID NO: 984 - protein, 9 aa, Artificial Sequence
  Description of Artificial Sequence: Synthetic peptide
VTCVKKCPR

SEQ ID NO: 985 - protein, 9 aa, Artificial Sequence
  Description of Artificial Sequence: Synthetic peptide
YSFGVTCVK

SEQ ID NO: 986 - protein, 10 aa, Artificial Sequence
  Description of Artificial Sequence: Synthetic peptide
YSFGVTCVKK

SEQ ID NO: 987 - protein, 13 aa, Artificial Sequence
  Description of Artificial Sequence: Synthetic peptide
YSFGVTCVKKCPR

SEQ ID NO: 988 - protein, 9 aa, Artificial Sequence
  Description of Artificial Sequence: Synthetic peptide
AVVMGENNT

SEQ ID NO: 989 - protein, 10 aa, Artificial Sequence
  Description of Artificial Sequence: Synthetic peptide
AVVMGENNTL

SEQ ID NO: 990 - protein, 9 aa, Artificial Sequence
  Description of Artificial Sequence: Synthetic peptide
CPAVVMGEN

SEQ ID NO: 991 - protein, 9 aa, Artificial Sequence
  Description of Artificial Sequence: Synthetic peptide
CVKTCPAVV

SEQ ID NO: 992 - protein, 10 aa, Artificial Sequence
  Description of Artificial Sequence: Synthetic peptide
CVKTCPAVVM

SEQ ID NO: 993 - protein, 9 aa, Artificial Sequence
  Description of Artificial Sequence: Synthetic peptide
HCVKTCPAV

SEQ ID NO: 994 - protein, 9 aa, Artificial Sequence
  Description of Artificial Sequence: Synthetic peptide
KTCPAVVMG

SEQ ID NO: 995 - protein, 9 aa, Artificial Sequence
  Description of Artificial Sequence: Synthetic peptide
PAVVMGENN

SEQ ID NO: 996 - protein, 9 aa, Artificial Sequence
  Description of Artificial Sequence: Synthetic peptide
TCPAVVMGE

SEQ ID NO: 997 - protein, 9 aa, Artificial Sequence
  Description of Artificial Sequence: Synthetic peptide
VKTCPAVVM

SEQ ID NO: 998 - protein, 9 aa, Artificial Sequence
  Description of Artificial Sequence: Synthetic peptide
VVMGENNTL

SEQ ID NO: 999 - protein, 8 aa, Artificial Sequence
  Description of Artificial Sequence: Synthetic peptide
DFGRAKLL

SEQ ID NO: 1000 - protein, 9 aa, Artificial Sequence
  Description of Artificial Sequence: Synthetic peptide
DFGRAKLLG

SEQ ID NO: 1001 - protein, 8 aa, Artificial Sequence
  Description of Artificial Sequence: Synthetic peptide
FGRAKLLG

SEQ ID NO: 1002 - protein, 9 aa, Artificial Sequence
  Description of Artificial Sequence: Synthetic peptide
FGRAKLLGA

SEQ ID NO: 1003 - protein, 9 aa, Artificial Sequence
  Description of Artificial Sequence: Synthetic peptide
GRAKLLGAE

SEQ ID NO: 1004 - protein, 9 aa, Artificial Sequence
  Description of Artificial Sequence: Synthetic peptide
HVKITDFGR

SEQ ID NO: 1005 - protein, 9 aa, Artificial Sequence
  Description of Artificial Sequence: Synthetic peptide
ITDFGRAKL

SEQ ID NO: 1006 - protein, 9 aa, Artificial Sequence
  Description of Artificial Sequence: Synthetic peptide
KITDFGRAK

SEQ ID NO: 1007 - protein, 9 aa, Artificial Sequence
  Description of Artificial Sequence: Synthetic peptide
RAKLLGAEE

SEQ ID NO: 1008 - protein, 9 aa, Artificial Sequence
  Description of Artificial Sequence: Synthetic peptide
TDFGRAKLL

SEQ ID NO: 1009 - protein, 9 aa, Artificial Sequence
  Description of Artificial Sequence: Synthetic peptide
VKITDFGRA

SEQ ID NO: 1010 - protein, 8 aa, Artificial Sequence
  Description of Artificial Sequence: Synthetic peptide
DVGFCTLV

SEQ ID NO: 1011 - protein, 9 aa, Artificial Sequence
  Description of Artificial Sequence: Synthetic peptide
DVGFCTLVC

SEQ ID NO: 1012 - protein, 9 aa, Artificial Sequence
  Description of Artificial Sequence: Synthetic peptide
FCTLVCPLH

SEQ ID NO: 1013 - protein, 9 aa, Artificial Sequence
  Description of Artificial Sequence: Synthetic peptide
GFCTLVCPL

SEQ ID NO: 1014 - protein, 9 aa, Artificial Sequence
  Description of Artificial Sequence: Synthetic peptide
LSTDVGFCT

SEQ ID NO: 1015 - protein, 9 aa, Artificial Sequence
  Description of Artificial Sequence: Synthetic peptide
NYLSTDVGF

SEQ ID NO: 1016 - protein, 13 aa, Artificial Sequence
  Description of Artificial Sequence: Synthetic peptide
NYLSTDVGFCTLV

SEQ ID NO: 1017 - protein, 14 aa, Artificial Sequence
  Description of Artificial Sequence: Synthetic peptide
NYLSTDVGFCTLVC

SEQ ID NO: 1018 - protein, 9 aa, Artificial Sequence
  Description of Artificial Sequence: Synthetic peptide
STDVGFCTL

SEQ ID NO: 1019 - protein, 10 aa, Artificial Sequence
  Description of Artificial Sequence: Synthetic peptide
STDVGFCTLV

SEQ ID NO: 1020 - protein, 9 aa, Artificial Sequence
  Description of Artificial Sequence: Synthetic peptide
TDVGFCTLV

SEQ ID NO: 1021 - protein, 9 aa, Artificial Sequence
  Description of Artificial Sequence: Synthetic peptide
VGFCTLVCP

SEQ ID NO: 1022 - protein, 10 aa, Artificial Sequence
  Description of Artificial Sequence: Synthetic peptide
VGFCTLVCPL

SEQ ID NO: 1023 - protein, 9 aa, Artificial Sequence
  Description of Artificial Sequence: Synthetic peptide
YLSTDVGFC

SEQ ID NO: 1024 - protein, 10 aa, Artificial Sequence
  Description of Artificial Sequence: Synthetic peptide
YLSTDVGFCT

SEQ ID NO: 1025 - protein, 12 aa, Artificial Sequence
  Description of Artificial Sequence: Synthetic peptide
YLSTDVGFCTLV

SEQ ID NO: 1026 - protein, 13 aa, Artificial Sequence
  Description of Artificial Sequence: Synthetic peptide
YLSTDVGFCTLVC

SEQ ID NO: 1027 - protein, 14 aa, Artificial Sequence
  Description of Artificial Sequence: Synthetic peptide
YLSTDVGFCTLVCP

SEQ ID NO: 1028 - protein, 9 aa, Artificial Sequence
  Description of Artificial Sequence: Synthetic peptide
CCMHLHEKR

SEQ ID NO: 1029 - protein, 8 aa, Artificial Sequence
  Description of Artificial Sequence: Synthetic peptide
CMHLHEKR

SEQ ID NO: 1030 - protein, 9 aa, Artificial Sequence
  Description of Artificial Sequence: Synthetic peptide
GHTSTVCCM

SEQ ID NO: 1031 - protein, 14 aa, Artificial Sequence
  Description of Artificial Sequence: Synthetic peptide
GHTSTVCCMHLHEK

SEQ ID NO: 1032 - protein, 9 aa, Artificial Sequence
  Description of Artificial Sequence: Synthetic peptide
HTSTVCCMH

SEQ ID NO: 1033 - protein, 13 aa, Artificial Sequence
  Description of Artificial Sequence: Synthetic peptide
HTSTVCCMHLHEK

SEQ ID NO: 1034 - protein, 14 aa, Artificial Sequence
  Description of Artificial Sequence: Synthetic peptide
HTSTVCCMHLHEKR

SEQ ID NO: 1035 - protein, 9 aa, Artificial Sequence
  Description of Artificial Sequence: Synthetic peptide
LYGHTSTVC

SEQ ID NO: 1036 - protein, 11 aa, Artificial Sequence
  Description of Artificial Sequence: Synthetic peptide
LYGHTSTVCCM

SEQ ID NO: 1037 - protein, 9 aa, Artificial Sequence
  Description of Artificial Sequence: Synthetic peptide
STVCCMHLH

SEQ ID NO: 1038 - protein, 11 aa, Artificial Sequence
  Description of Artificial Sequence: Synthetic peptide
STVCCMHLHEK

SEQ ID NO: 1039 - protein, 12 aa, Artificial Sequence
  Description of Artificial Sequence: Synthetic peptide
STVCCMHLHEKR

SEQ ID NO: 1040 - protein, 9 aa, Artificial Sequence
  Description of Artificial Sequence: Synthetic peptide
TSTVCCMHL

SEQ ID NO: 1041 - protein, 12 aa, Artificial Sequence
  Description of Artificial Sequence: Synthetic peptide
TSTVCCMHLHEK

SEQ ID NO: 1042 - protein, 13 aa, Artificial Sequence
  Description of Artificial Sequence: Synthetic peptide
TSTVCCMHLHEKR

SEQ ID NO: 1043 - protein, 9 aa, Artificial Sequence
  Description of Artificial Sequence: Synthetic peptide
TVCCMHLHE

SEQ ID NO: 1044 - protein, 10 aa, Artificial Sequence
  Description of Artificial Sequence: Synthetic peptide
TVCCMHLHEK

SEQ ID NO: 1045 - protein, 10 aa, Artificial Sequence
  Description of Artificial Sequence: Synthetic peptide
VCCMHLHEKR

SEQ ID NO: 1046 - protein, 9 aa, Artificial Sequence
  Description of Artificial Sequence: Synthetic peptide
YGHTSTVCC

SEQ ID NO: 1047 - protein, 10 aa, Artificial Sequence
  Description of Artificial Sequence: Synthetic peptide
YGHTSTVCCM

SEQ ID NO: 1048 - protein, 9 aa, Artificial Sequence
  Description of Artificial Sequence: Synthetic peptide
CPHRPILQA

SEQ ID NO: 1049 - protein, 9 aa, Artificial Sequence
  Description of Artificial Sequence: Synthetic peptide
DVLERCPHR

SEQ ID NO: 1050 - protein, 11 aa, Artificial Sequence
  Description of Artificial Sequence: Synthetic peptide
DVLERCPHRPI

SEQ ID NO: 1051 - protein, 9 aa, Artificial Sequence
  Description of Artificial Sequence: Synthetic peptide
ERCPHRPIL

SEQ ID NO: 1052 - protein, 9 aa, Artificial Sequence
  Description of Artificial Sequence: Synthetic peptide
LDVLERCPH

SEQ ID NO: 1053 - protein, 9 aa, Artificial Sequence
  Description of Artificial Sequence: Synthetic peptide
LERCPHRPI

SEQ ID NO: 1054 - protein, 10 aa, Artificial Sequence
  Description of Artificial Sequence: Synthetic peptide
LERCPHRPIL

SEQ ID NO: 1055 - protein, 9 aa, Artificial Sequence
  Description of Artificial Sequence: Synthetic peptide
RCPHRPILQ

SEQ ID NO: 1056 - protein, 10 aa, Artificial Sequence
  Description of Artificial Sequence: Synthetic peptide
RCPHRPILQA

SEQ ID NO: 1057 - protein, 9 aa, Artificial Sequence
  Description of Artificial Sequence: Synthetic peptide
TLDVLERCP

SEQ ID NO: 1058 - protein, 9 aa, Artificial Sequence
  Description of Artificial Sequence: Synthetic peptide
VLERCPHRP

SEQ ID NO: 1059 - protein, 9 aa, Artificial Sequence
  Description of Artificial Sequence: Synthetic peptide
YTLDVLERC

SEQ ID NO: 1060 - protein, 12 aa, Artificial Sequence
  Description of Artificial Sequence: Synthetic peptide
YTLDVLERCPHR

SEQ ID NO: 1061 - protein, 9 aa, Artificial Sequence
  Description of Artificial Sequence: Synthetic peptide
ARYIMSDSN

SEQ ID NO: 1062 - protein, 10 aa, Artificial Sequence
  Description of Artificial Sequence: Synthetic peptide
ARYIMSDSNY

SEQ ID NO: 1063 - protein, 11 aa, Artificial Sequence
  Description of Artificial Sequence: Synthetic peptide
ARYIMSDSNYV

SEQ ID NO: 1064 - protein, 9 aa, Artificial Sequence
  Description of Artificial Sequence: Synthetic peptide
CDFGLARYI

SEQ ID NO: 1065 - protein, 10 aa, Artificial Sequence
  Description of Artificial Sequence: Synthetic peptide
CDFGLARYIM

SEQ ID NO: 1066 - protein, 8 aa, Artificial Sequence
  Description of Artificial Sequence: Synthetic peptide
DFGLARYI

SEQ ID NO: 1067 - protein, 9 aa, Artificial Sequence
  Description of Artificial Sequence: Synthetic peptide
DFGLARYIM

SEQ ID NO: 1068 - protein, 8 aa, Artificial Sequence
  Description of Artificial Sequence: Synthetic peptide
FGLARYIM

SEQ ID NO: 1069 - protein, 9 aa, Artificial Sequence
  Description of Artificial Sequence: Synthetic peptide
FGLARYIMS

SEQ ID NO: 1070 - protein, 10 aa, Artificial Sequence
  Description of Artificial Sequence: Synthetic peptide
FGLARYIMSD

SEQ ID NO: 1071 - protein, 14 aa, Artificial Sequence
  Description of Artificial Sequence: Synthetic peptide
FGLARYIMSDSNYV

SEQ ID NO: 1072 - protein, 8 aa, Artificial Sequence
  Description of Artificial Sequence: Synthetic peptide
GLARYIMS

SEQ ID NO: 1073 - protein, 9 aa, Artificial Sequence
  Description of Artificial Sequence: Synthetic peptide
GLARYIMSD

SEQ ID NO: 1074 - protein, 13 aa, Artificial Sequence
  Description of Artificial Sequence: Synthetic peptide
GLARYIMSDSNYV

SEQ ID NO: 1075 - protein, 9 aa, Artificial Sequence
  Description of Artificial Sequence: Synthetic peptide
ICDFGLARY

SEQ ID NO: 1076 - protein, 8 aa, Artificial Sequence
  Description of Artificial Sequence: Synthetic peptide
IMSDSNYV

SEQ ID NO: 1077 - protein, 9 aa, Artificial Sequence
  Description of Artificial Sequence: Synthetic peptide
LARYIMSDS

SEQ ID NO: 1078 - protein, 12 aa, Artificial Sequence
  Description of Artificial Sequence: Synthetic peptide
LARYIMSDSNYV

SEQ ID NO: 1079 - protein, 9 aa, Artificial Sequence
  Description of Artificial Sequence: Synthetic peptide
RYIMSDSNY

SEQ ID NO: 1080 - protein, 10 aa, Artificial Sequence
  Description of Artificial Sequence: Synthetic peptide
RYIMSDSNYV

SEQ ID NO: 1081 - protein, 9 aa, Artificial Sequence
  Description of Artificial Sequence: Synthetic peptide
YIMSDSNYV

SEQ ID NO: 1082 - protein, 8 aa, Artificial Sequence
  Description of Artificial Sequence: Synthetic peptide
DVGGLRSE

SEQ ID NO: 1083 - protein, 9 aa, Artificial Sequence
  Description of Artificial Sequence: Synthetic peptide
DVGGLRSER

SEQ ID NO: 1084 - protein, 10 aa, Artificial Sequence
  Description of Artificial Sequence: Synthetic peptide
DVGGLRSERR

SEQ ID NO: 1085 - protein, 11 aa, Artificial Sequence
  Description of Artificial Sequence: Synthetic peptide
DVGGLRSERRK

SEQ ID NO: 1086 - protein, 9 aa, Artificial Sequence
  Description of Artificial Sequence: Synthetic peptide
FRMVDVGGL

SEQ ID NO: 1087 - protein, 10 aa, Artificial Sequence
  Description of Artificial Sequence: Synthetic peptide
FRMVDVGGLR

SEQ ID NO: 1088 - protein, 13 aa, Artificial Sequence
  Description of Artificial Sequence: Synthetic peptide
FRMVDVGGLRSER

SEQ ID NO: 1089 - protein, 14 aa, Artificial Sequence
  Description of Artificial Sequence: Synthetic peptide
FRMVDVGGLRSERR

SEQ ID NO: 1090 - protein, 9 aa, Artificial Sequence
  Description of Artificial Sequence: Synthetic peptide
GGLRSERRK

SEQ ID NO: 1091 - protein, 9 aa, Artificial Sequence
  Description of Artificial Sequence: Synthetic peptide
GLRSERRKW

SEQ ID NO: 1092 - protein, 9 aa, Artificial Sequence
  Description of Artificial Sequence: Synthetic peptide
LRSERRKWI

SEQ ID NO: 1093 - protein, 9 aa, Artificial Sequence
  Description of Artificial Sequence: Synthetic peptide
MVDVGGLRS

SEQ ID NO: 1094 - protein, 10 aa, Artificial Sequence
  Description of Artificial Sequence: Synthetic peptide
MVDVGGLRSE

SEQ ID NO: 1095 - protein, 9 aa, Artificial Sequence
  Description of Artificial Sequence: Synthetic peptide
RMVDVGGLR

SEQ ID NO: 1096 - protein, 12 aa, Artificial Sequence
  Description of Artificial Sequence: Synthetic peptide
RMVDVGGLRSER

SEQ ID NO: 1097 - protein, 13 aa, Artificial Sequence
  Description of Artificial Sequence: Synthetic peptide
RMVDVGGLRSERR

SEQ ID NO: 1098 - protein, 14 aa, Artificial Sequence
  Description of Artificial Sequence: Synthetic peptide
RMVDVGGLRSERRK

SEQ ID NO: 1099 - protein, 9 aa, Artificial Sequence
  Description of Artificial Sequence: Synthetic peptide
VDVGGLRSE

SEQ ID NO: 1100 - protein, 11 aa, Artificial Sequence
  Description of Artificial Sequence: Synthetic peptide
VDVGGLRSERR

SEQ ID NO: 1101 - protein, 9 aa, Artificial Sequence
  Description of Artificial Sequence: Synthetic peptide
VGGLRSERR

SEQ ID NO: 1102 - protein, 9 aa, Artificial Sequence
  Description of Artificial Sequence: Synthetic peptide
DVGGPRSER

SEQ ID NO: 1103 - protein, 10 aa, Artificial Sequence
  Description of Artificial Sequence: Synthetic peptide
DVGGPRSERR

SEQ ID NO: 1104 - protein, 11 aa, Artificial Sequence
  Description of Artificial Sequence: Synthetic peptide
DVGGPRSERRK

SEQ ID NO: 1105 - protein, 9 aa, Artificial Sequence
  Description of Artificial Sequence: Synthetic peptide
FRMVDVGGP

SEQ ID NO: 1106 - protein, 10 aa, Artificial Sequence
  Description of Artificial Sequence: Synthetic peptide
FRMVDVGGPR

SEQ ID NO: 1107 - protein, 11 aa, Artificial Sequence
  Description of Artificial Sequence: Synthetic peptide
FRMVDVGGPRS

SEQ ID NO: 1108 - protein, 12 aa, Artificial Sequence
  Description of Artificial Sequence: Synthetic peptide
FRMVDVGGPRSE

SEQ ID NO: 1109 - protein, 13 aa, Artificial Sequence
  Description of Artificial Sequence: Synthetic peptide
FRMVDVGGPRSER

SEQ ID NO: 1110 - protein, 14 aa, Artificial Sequence
  Description of Artificial Sequence: Synthetic peptide
FRMVDVGGPRSERR

SEQ ID NO: 1111 - protein, 9 aa, Artificial Sequence
  Description of Artificial Sequence: Synthetic peptide
GGPRSERRK

SEQ ID NO: 1112 - protein, 9 aa, Artificial Sequence
  Description of Artificial Sequence: Synthetic peptide
GPRSERRKW

SEQ ID NO: 1113 - protein, 10 aa, Artificial Sequence
  Description of Artificial Sequence: Synthetic peptide
GPRSERRKWI

SEQ ID NO: 1114 - protein, 9 aa, Artificial Sequence
  Description of Artificial Sequence: Synthetic peptide
MVDVGGPRS

SEQ ID NO: 1115 - protein, 10 aa, Artificial Sequence
  Description of Artificial Sequence: Synthetic peptide
MVDVGGPRSE

SEQ ID NO: 1116 - protein, 9 aa, Artificial Sequence
  Description of Artificial Sequence: Synthetic peptide
PRSERRKWI

SEQ ID NO: 1117 - protein, 9 aa, Artificial Sequence
  Description of Artificial Sequence: Synthetic peptide
RMVDVGGPR

SEQ ID NO: 1118 - protein, 12 aa, Artificial Sequence
  Description of Artificial Sequence: Synthetic peptide
RMVDVGGPRSER

SEQ ID NO: 1119 - protein, 13 aa, Artificial Sequence
  Description of Artificial Sequence: Synthetic peptide
RMVDVGGPRSERR

SEQ ID NO: 1120 - protein, 9 aa, Artificial Sequence
  Description of Artificial Sequence: Synthetic peptide
VDVGGPRSE

SEQ ID NO: 1121 - protein, 11 aa, Artificial Sequence
  Description of Artificial Sequence: Synthetic peptide
VDVGGPRSERR

SEQ ID NO: 1122 - protein, 9 aa, Artificial Sequence
  Description of Artificial Sequence: Synthetic peptide
VGGPRSERR

SEQ ID NO: 1123 - protein, 10 aa, Artificial Sequence
  Description of Artificial Sequence: Synthetic peptide
RMSAPSTGGV

SEQ ID NO: 1124 - protein, 9 aa, Artificial Sequence
  Description of Artificial Sequence: Synthetic peptide
AGREEYSAM

SEQ ID NO: 1125 - protein, 10 aa, Artificial Sequence
  Description of Artificial Sequence: Synthetic peptide
AGREEYSAMR

SEQ ID NO: 1126 - protein, 9 aa, Artificial Sequence
  Description of Artificial Sequence: Synthetic peptide
DILDTAGRE

SEQ ID NO: 1127 - protein, 11 aa, Artificial Sequence
  Description of Artificial Sequence: Synthetic peptide
DILDTAGREEY

SEQ ID NO: 1128 - protein, 8 aa, Artificial Sequence
  Description of Artificial Sequence: Synthetic peptide
DTAGREEY

SEQ ID NO: 1129 - protein, 9 aa, Artificial Sequence
  Description of Artificial Sequence: Synthetic peptide
DTAGREEYS

SEQ ID NO: 1130 - protein, 11 aa, Artificial Sequence
  Description of Artificial Sequence: Synthetic peptide
DTAGREEYSAM

SEQ ID NO: 1131 - protein, 12 aa, Artificial Sequence
  Description of Artificial Sequence: Synthetic peptide
DTAGREEYSAMR

SEQ ID NO: 1132 - protein, 13 aa, Artificial Sequence
  Description of Artificial Sequence: Synthetic peptide
DTAGREEYSAMRD

SEQ ID NO: 1133 - protein, 8 aa, Artificial Sequence
  Description of Artificial Sequence: Synthetic peptide
EEYSAMRD

SEQ ID NO: 1134 - protein, 9 aa, Artificial Sequence
  Description of Artificial Sequence: Synthetic peptide
GREEYSAMR

SEQ ID NO: 1135 - protein, 10 aa, Artificial Sequence
  Description of Artificial Sequence: Synthetic peptide
GREEYSAMRD

SEQ ID NO: 1136 - protein, 9 aa, Artificial Sequence
  Description of Artificial Sequence: Synthetic peptide
ILDTAGREE

SEQ ID NO: 1137 - protein, 14 aa, Artificial Sequence
  Description of Artificial Sequence: Synthetic peptide
ILDTAGREEYSAMR

SEQ ID NO: 1138 - protein, 9 aa, Artificial Sequence
  Description of Artificial Sequence: Synthetic peptide
LDILDTAGR

SEQ ID NO: 1139 - protein, 9 aa, Artificial Sequence
  Description of Artificial Sequence: Synthetic peptide
LDTAGREEY

SEQ ID NO: 1140 - protein, 13 aa, Artificial Sequence
  Description of Artificial Sequence: Synthetic peptide
LDTAGREEYSAMR

SEQ ID NO: 1141 - protein, 9 aa, Artificial Sequence
  Description of Artificial Sequence: Synthetic peptide
REEYSAMRD

SEQ ID NO: 1142 - protein, 8 aa, Artificial Sequence
  Description of Artificial Sequence: Synthetic peptide
TAGREEYS

SEQ ID NO: 1143 - protein, 9 aa, Artificial Sequence
  Description of Artificial Sequence: Synthetic peptide
TAGREEYSA

SEQ ID NO: 1144 - protein, 9 aa, Artificial Sequence
  Description of Artificial Sequence: Synthetic peptide
GHHAYGDQY

SEQ ID NO: 1145 - protein, 10 aa, Artificial Sequence
  Description of Artificial Sequence: Synthetic peptide
GHHAYGDQYR

SEQ ID NO: 1146 - protein, 9 aa, Artificial Sequence
  Description of Artificial Sequence: Synthetic peptide
HHAYGDQYR

SEQ ID NO: 1147 - protein, 9 aa, Artificial Sequence
  Description of Artificial Sequence: Synthetic peptide
IGHHAYGDQ

SEQ ID NO: 1148 - protein, 10 aa, Artificial Sequence
  Description of Artificial Sequence: Synthetic peptide
IGHHAYGDQY

SEQ ID NO: 1149 - protein, 9 aa, Artificial Sequence
  Description of Artificial Sequence: Synthetic peptide
IIGHHAYGD

SEQ ID NO: 1150 - protein, 11 aa, Artificial Sequence
  Description of Artificial Sequence: Synthetic peptide
IIGHHAYGDQY

SEQ ID NO: 1151 - protein, 12 aa, Artificial Sequence
  Description of Artificial Sequence: Synthetic peptide
IIGHHAYGDQYR

SEQ ID NO: 1152 - protein, 8 aa, Artificial Sequence
  Description of Artificial Sequence: Synthetic peptide
IIIGHHAY

SEQ ID NO: 1153 - protein, 9 aa, Artificial Sequence
  Description of Artificial Sequence: Synthetic peptide
IIIGHHAYG

SEQ ID NO: 1154 - protein, 12 aa, Artificial Sequence
  Description of Artificial Sequence: Synthetic peptide
IIIGHHAYGDQY

SEQ ID NO: 1155 - protein, 13 aa, Artificial Sequence
  Description of Artificial Sequence: Synthetic peptide
IIIGHHAYGDQYR

SEQ ID NO: 1156 - protein, 9 aa, Artificial Sequence
  Description of Artificial Sequence: Synthetic peptide
KPIIIGHHA

SEQ ID NO: 1157 - protein, 10 aa, Artificial Sequence
  Description of Artificial Sequence: Synthetic peptide
KPIIIGHHAY

SEQ ID NO: 1158 - protein, 11 aa, Artificial Sequence
  Description of Artificial Sequence: Synthetic peptide
KPIIIGHHAYG

SEQ ID NO: 1159 - protein, 14 aa, Artificial Sequence
  Description of Artificial Sequence: Synthetic peptide
KPIIIGHHAYGDQY

SEQ ID NO: 1160 - protein, 9 aa, Artificial Sequence
  Description of Artificial Sequence: Synthetic peptide
PIIIGHHAY

SEQ ID NO: 1161 - protein, 11 aa, Artificial Sequence
  Description of Artificial Sequence: Synthetic peptide
PIIIGHHAYGD

SEQ ID NO: 1162 - protein, 13 aa, Artificial Sequence
  Description of Artificial Sequence: Synthetic peptide
PIIIGHHAYGDQY

SEQ ID NO: 1163 - protein, 14 aa, Artificial Sequence
  Description of Artificial Sequence: Synthetic peptide
PIIIGHHAYGDQYR

SEQ ID NO: 1164 - protein, 9 aa, Artificial Sequence
  Description of Artificial Sequence: Synthetic peptide
VKPIIIGHH

SEQ ID NO: 1165 - protein, 11 aa, Artificial Sequence
  Description of Artificial Sequence: Synthetic peptide
VKPIIIGHHAY

SEQ ID NO: 1166 - protein, 9 aa, Artificial Sequence
  Description of Artificial Sequence: Synthetic peptide
WVKPIIIGH

SEQ ID NO: 1167 - protein, 12 aa, Artificial Sequence
  Description of Artificial Sequence: Synthetic peptide
WVKPIIIGHHAY

SEQ ID NO: 1168 - protein, 9 aa, Artificial Sequence
  Description of Artificial Sequence: Synthetic peptide
DIVSEKNQQ

SEQ ID NO: 1169 - protein, 11 aa, Artificial Sequence
  Description of Artificial Sequence: Synthetic peptide
DIVSEKNQQLK

SEQ ID NO: 1170 - protein, 9 aa, Artificial Sequence
  Description of Artificial Sequence: Synthetic peptide
EKNQQLKWT

SEQ ID NO: 1171 - protein, 9 aa, Artificial Sequence
  Description of Artificial Sequence: Synthetic peptide
IVSEKNQQL

SEQ ID NO: 1172 - protein, 10 aa, Artificial Sequence
  Description of Artificial Sequence: Synthetic peptide
IVSEKNQQLK

SEQ ID NO: 1173 - protein, 10 aa, Artificial Sequence
  Description of Artificial Sequence: Synthetic peptide
VSEKNQQLKW

SEQ ID NO: 1174 - protein, 10 aa, Artificial Sequence
  Description of Artificial Sequence: Synthetic peptide
SEKNQQLKWT

SEQ ID NO: 1175 - protein, 9 aa, Artificial Sequence
  Description of Artificial Sequence: Synthetic peptide
KNQQLKWTP

SEQ ID NO: 1176 - protein, 9 aa, Artificial Sequence
  Description of Artificial Sequence: Synthetic peptide
KWTPHILKS

SEQ ID NO: 1177 - protein, 10 aa, Artificial Sequence
  Description of Artificial Sequence: Synthetic peptide
KWTPHILKSA

SEQ ID NO: 1178 - protein, 9 aa, Artificial Sequence
  Description of Artificial Sequence: Synthetic peptide
LKWTPHILK

SEQ ID NO: 1179 - protein, 9 aa, Artificial Sequence
  Description of Artificial Sequence: Synthetic peptide
NPDIVSEKN

SEQ ID NO: 1180 - protein, 11 aa, Artificial Sequence
  Description of Artificial Sequence: Synthetic peptide
NPDIVSEKNQQ

SEQ ID NO: 1181 - protein, 9 aa, Artificial Sequence
  Description of Artificial Sequence: Synthetic peptide
NQQLKWTPH

SEQ ID NO: 1182 - protein, 9 aa, Artificial Sequence
  Description of Artificial Sequence: Synthetic peptide
PDIVSEKNQ

SEQ ID NO: 1183 - protein, 9 aa, Artificial Sequence
  Description of Artificial Sequence: Synthetic peptide
QLKWTPHIL

SEQ ID NO: 1184 - protein, 10 aa, Artificial Sequence
  Description of Artificial Sequence: Synthetic peptide
QLKWTPHILK

SEQ ID NO: 1185 - protein, 11 aa, Artificial Sequence
  Description of Artificial Sequence: Synthetic peptide
QLKWTPHILKS

SEQ ID NO: 1186 - protein, 9 aa, Artificial Sequence
  Description of Artificial Sequence: Synthetic peptide
QQLKWTPHI

SEQ ID NO: 1187 - protein, 10 aa, Artificial Sequence
  Description of Artificial Sequence: Synthetic peptide
QQLKWTPHIL

SEQ ID NO: 1188 - protein, 11 aa, Artificial Sequence
  Description of Artificial Sequence: Synthetic peptide
QQLKWTPHILK

SEQ ID NO: 1189 - protein, 8 aa, Artificial Sequence
  Description of Artificial Sequence: Synthetic peptide
SEKNQQLK

SEQ ID NO: 1190 - protein, 9 aa, Artificial Sequence
  Description of Artificial Sequence: Synthetic peptide
SEKNQQLKW

SEQ ID NO: 1191 - protein, 8 aa, Artificial Sequence
  Description of Artificial Sequence: Synthetic peptide
TPHILKSA

SEQ ID NO: 1192 - protein, 9 aa, Artificial Sequence
  Description of Artificial Sequence: Synthetic peptide
TPHILKSAS

SEQ ID NO: 1193 - protein, 9 aa, Artificial Sequence
  Description of Artificial Sequence: Synthetic peptide
VSEKNQQLK

SEQ ID NO: 1194 - protein, 9 aa, Artificial Sequence
  Description of Artificial Sequence: Synthetic peptide
WTPHILKSA

SEQ ID NO: 1195 - protein, 9 aa, Artificial Sequence
  Description of Artificial Sequence: Synthetic peptide
ACGVGKSAL

SEQ ID NO: 1196 - protein, 9 aa, Artificial Sequence
  Description of Artificial Sequence: Synthetic peptide
CGVGKSALT

SEQ ID NO: 1197 - protein, 9 aa, Artificial Sequence
  Description of Artificial Sequence: Synthetic peptide
GACGVGKSA

SEQ ID NO: 1198 - protein, 8 aa, Artificial Sequence
  Description of Artificial Sequence: Synthetic peptide
GVGKSALT

SEQ ID NO: 1199 - protein, 9 aa, Artificial Sequence
  Description of Artificial Sequence: Synthetic peptide
KLVVVGACG

SEQ ID NO: 1200 - protein, 10 aa, Artificial Sequence
  Description of Artificial Sequence: Synthetic peptide
KLVVVGACGV

SEQ ID NO: 1201 - protein, 12 aa, Artificial Sequence
  Description of Artificial Sequence: Synthetic peptide
KLVVVGACGVGK

SEQ ID NO: 1202 - protein, 9 aa, Artificial Sequence
  Description of Artificial Sequence: Synthetic peptide
LVVVGACGV

SEQ ID NO: 1203 - protein, 11 aa, Artificial Sequence
  Description of Artificial Sequence: Synthetic peptide
LVVVGACGVGK

SEQ ID NO: 1204 - protein, 9 aa, Artificial Sequence
  Description of Artificial Sequence: Synthetic peptide
VGACGVGKS

SEQ ID NO: 1205 - protein, 9 aa, Artificial Sequence
  Description of Artificial Sequence: Synthetic peptide
VVGACGVGK

SEQ ID NO: 1206 - protein, 9 aa, Artificial Sequence
  Description of Artificial Sequence: Synthetic peptide
VVVGACGVG

SEQ ID NO: 1207 - protein, 10 aa, Artificial Sequence
  Description of Artificial Sequence: Synthetic peptide
VVVGACGVGK

SEQ ID NO: 1208 - protein, 9 aa, Artificial Sequence
  Description of Artificial Sequence: Synthetic peptide
YKLVVVGAC

SEQ ID NO: 1209 - protein, 9 aa, Artificial Sequence
  Description of Artificial Sequence: Synthetic peptide
ADGVGKSAL

SEQ ID NO: 1210 - protein, 9 aa, Artificial Sequence
  Description of Artificial Sequence: Synthetic peptide
DGVGKSALT

SEQ ID NO: 1211 - protein, 9 aa, Artificial Sequence
  Description of Artificial Sequence: Synthetic peptide
GADGVGKSA

SEQ ID NO: 1212 - protein, 9 aa, Artificial Sequence
  Description of Artificial Sequence: Synthetic peptide
KLVVVGADG

SEQ ID NO: 1213 - protein, 10 aa, Artificial Sequence
  Description of Artificial Sequence: Synthetic peptide
KLVVVGADGV

SEQ ID NO: 1214 - protein, 9 aa, Artificial Sequence
  Description of Artificial Sequence: Synthetic peptide
LVVVGADGV

SEQ ID NO: 1215 - protein, 11 aa, Artificial Sequence
  Description of Artificial Sequence: Synthetic peptide
LVVVGADGVGK

SEQ ID NO: 1216 - protein, 9 aa, Artificial Sequence
  Description of Artificial Sequence: Synthetic peptide
VGADGVGKS

SEQ ID NO: 1217 - protein, 9 aa, Artificial Sequence
  Description of Artificial Sequence: Synthetic peptide
VVGADGVGK

SEQ ID NO: 1218 - protein, 9 aa, Artificial Sequence
  Description of Artificial Sequence: Synthetic peptide
VVVGADGVG

SEQ ID NO: 1219 - protein, 10 aa, Artificial Sequence
  Description of Artificial Sequence: Synthetic peptide
VVVGADGVGK

SEQ ID NO: 1220 - protein, 9 aa, Artificial Sequence
  Description of Artificial Sequence: Synthetic peptide
YKLVVVGAD

SEQ ID NO: 1221 - protein, 9 aa, Artificial Sequence
  Description of Artificial Sequence: Synthetic peptide
AVGVGKSAL

SEQ ID NO: 1222 - protein, 9 aa, Artificial Sequence
  Description of Artificial Sequence: Synthetic peptide
GAVGVGKSA

SEQ ID NO: 1223 - protein, 8 aa, Artificial Sequence
  Description of Artificial Sequence: Synthetic peptide
KLVVVGAV

SEQ ID NO: 1224 - protein, 9 aa, Artificial Sequence
  Description of Artificial Sequence: Synthetic peptide
KLVVVGAVG

SEQ ID NO: 1225 - protein, 12 aa, Artificial Sequence
  Description of Artificial Sequence: Synthetic peptide
KLVVVGAVGVGK

SEQ ID NO: 1226 - protein, 10 aa, Artificial Sequence
  Description of Artificial Sequence: Synthetic peptide
LVVVGAVGVG

SEQ ID NO: 1227 - protein, 11 aa, Artificial Sequence
  Description of Artificial Sequence: Synthetic peptide
LVVVGAVGVGK

SEQ ID NO: 1228 - protein, 9 aa, Artificial Sequence
  Description of Artificial Sequence: Synthetic peptide
VGAVGVGKS

SEQ ID NO: 1229 - protein, 9 aa, Artificial Sequence
  Description of Artificial Sequence: Synthetic peptide
VGVGKSALT

SEQ ID NO: 1230 - protein, 9 aa, Artificial Sequence
  Description of Artificial Sequence: Synthetic peptide
VVGAVGVGK

SEQ ID NO: 1231 - protein, 10 aa, Artificial Sequence
  Description of Artificial Sequence: Synthetic peptide
VVVGAVGVGK

SEQ ID NO: 1232 - protein, 9 aa, Artificial Sequence
  Description of Artificial Sequence: Synthetic peptide
YKLVVVGAV

SEQ ID NO: 1233 - protein, 9 aa, Artificial Sequence
  Description of Artificial Sequence: Synthetic peptide
AGDVGKSAL

SEQ ID NO: 1234 - protein, 8 aa, Artificial Sequence
  Description of Artificial Sequence: Synthetic peptide
DVGKSALT

SEQ ID NO: 1235 - protein, 9 aa, Artificial Sequence
  Description of Artificial Sequence: Synthetic peptide
DVGKSALTI

SEQ ID NO: 1236 - protein, 8 aa, Artificial Sequence
  Description of Artificial Sequence: Synthetic peptide
GAGDVGKS

SEQ ID NO: 1237 - protein, 9 aa, Artificial Sequence
  Description of Artificial Sequence: Synthetic peptide
GAGDVGKSA

SEQ ID NO: 1238 - protein, 9 aa, Artificial Sequence
  Description of Artificial Sequence: Synthetic peptide
GDVGKSALT

SEQ ID NO: 1239 - protein, 9 aa, Artificial Sequence
  Description of Artificial Sequence: Synthetic peptide
KLVVVGAGD

SEQ ID NO: 1240 - protein, 9 aa, Artificial Sequence
  Description of Artificial Sequence: Synthetic peptide
LVVVGAGDV

SEQ ID NO: 1241 - protein, 11 aa, Artificial Sequence
  Description of Artificial Sequence: Synthetic peptide
LVVVGAGDVGK

SEQ ID NO: 1242 - protein, 9 aa, Artificial Sequence
  Description of Artificial Sequence: Synthetic peptide
VGAGDVGKS

SEQ ID NO: 1243 - protein, 9 aa, Artificial Sequence
  Description of Artificial Sequence: Synthetic peptide
VVGAGDVGK

SEQ ID NO: 1244 - protein, 9 aa, Artificial Sequence
  Description of Artificial Sequence: Synthetic peptide
VVVGAGDVG

SEQ ID NO: 1245 - protein, 10 aa, Artificial Sequence
  Description of Artificial Sequence: Synthetic peptide
VVVGAGDVGK

SEQ ID NO: 1246 - protein, 9 aa, Artificial Sequence
  Description of Artificial Sequence: Synthetic peptide
QEAIWDLCL

SEQ ID NO: 1247 - protein, 9 aa, Artificial Sequence
  Description of Artificial Sequence: Synthetic peptide
EAIWDLCLA

SEQ ID NO: 1248 - protein, 10 aa, Artificial Sequence
  Description of Artificial Sequence: Synthetic peptide
QEAIWDLCLA

SEQ ID NO: 1249 - protein, 9 aa, Artificial Sequence
  Description of Artificial Sequence: Synthetic peptide
DQEAIWDLC

SEQ ID NO: 1250 - protein, 10 aa, Artificial Sequence
  Description of Artificial Sequence: Synthetic peptide
DQEAIWDLCL

SEQ ID NO: 1251 - protein, 10 aa, Artificial Sequence
  Description of Artificial Sequence: Synthetic peptide
EAIWDLCLAV

SEQ ID NO: 1252 - protein, 9 aa, Artificial Sequence
  Description of Artificial Sequence: Synthetic peptide
AIWDLCLAV

SEQ ID NO: 1253 - protein, 9 aa, Artificial Sequence
  Description of Artificial Sequence: Synthetic peptide
IWDLCLAVE

SEQ ID NO: 1254 - protein, 10 aa, Artificial Sequence
  Description of Artificial Sequence: Synthetic peptide
AIWDLCLAVE

SEQ ID NO: 1255 - protein, 9 aa, Artificial Sequence
  Description of Artificial Sequence: Synthetic peptide
WDLCLAVEE

SEQ ID NO: 1256 - protein, 10 aa, Artificial Sequence
  Description of Artificial Sequence: Synthetic peptide
WDLCLAVEEV

SEQ ID NO: 1257 - protein, 9 aa, Artificial Sequence
  Description of Artificial Sequence: Synthetic peptide
AIQDLCLAV

SEQ ID NO: 1258 - protein, 10 aa, Artificial Sequence
  Description of Artificial Sequence: Synthetic peptide
AIQDLCLAVE

SEQ ID NO: 1259 - protein, 9 aa, Artificial Sequence
  Description of Artificial Sequence: Synthetic peptide
AVEEVSLRK

SEQ ID NO: 1260 - protein, 8 aa, Artificial Sequence
  Description of Artificial Sequence: Synthetic peptide
CLAVEEVS

SEQ ID NO: 1261 - protein, 9 aa, Artificial Sequence
  Description of Artificial Sequence: Synthetic peptide
CLAVEEVSL

SEQ ID NO: 1262 - protein, 10 aa, Artificial Sequence
  Description of Artificial Sequence: Synthetic peptide
CLAVEEVSLR

SEQ ID NO: 1263 - protein, 11 aa, Artificial Sequence
  Description of Artificial Sequence: Synthetic peptide
CLAVEEVSLRK

SEQ ID NO: 1264 - protein, 9 aa, Artificial Sequence
  Description of Artificial Sequence: Synthetic peptide
DLCLAVEEV

SEQ ID NO: 1265 - protein, 10 aa, Artificial Sequence
  Description of Artificial Sequence: Synthetic peptide
DLCLAVEEVS

SEQ ID NO: 1266 - protein, 9 aa, Artificial Sequence
  Description of Artificial Sequence: Synthetic peptide
DQEAIQDLC

SEQ ID NO: 1267 - protein, 10 aa, Artificial Sequence
  Description of Artificial Sequence: Synthetic peptide
DQEAIQDLCL

SEQ ID NO: 1268 - protein, 9 aa, Artificial Sequence
  Description of Artificial Sequence: Synthetic peptide
EAIQDLCLA

SEQ ID NO: 1269 - protein, 9 aa, Artificial Sequence
  Description of Artificial Sequence: Synthetic peptide
IQDLCLAVE

SEQ ID NO: 1270 - protein, 10 aa, Artificial Sequence
  Description of Artificial Sequence: Synthetic peptide
IQDLCLAVEE

SEQ ID NO: 1271 - protein, 9 aa, Artificial Sequence
  Description of Artificial Sequence: Synthetic peptide
LAVEEVSLR

SEQ ID NO: 1272 - protein, 10 aa, Artificial Sequence
  Description of Artificial Sequence: Synthetic peptide
LAVEEVSLRK

SEQ ID NO: 1273 - protein, 9 aa, Artificial Sequence
  Description of Artificial Sequence: Synthetic peptide
LCLAVEEVS

SEQ ID NO: 1274 - protein, 10 aa, Artificial Sequence
  Description of Artificial Sequence: Synthetic peptide
LCLAVEEVSL

SEQ ID NO: 1275 - protein, 9 aa, Artificial Sequence
  Description of Artificial Sequence: Synthetic peptide
QDLCLAVEE

SEQ ID NO: 1276 - protein, 8 aa, Artificial Sequence
  Description of Artificial Sequence: Synthetic peptide
QEAIQDLC

SEQ ID NO: 1277 - protein, 9 aa, Artificial Sequence
  Description of Artificial Sequence: Synthetic peptide
QEAIQDLCL

SEQ ID NO: 1278 - protein, 11 aa, Artificial Sequence
  Description of Artificial Sequence: Synthetic peptide
QEAIQDLCLAV

SEQ ID NO: 1279 - protein, 9 aa, Artificial Sequence
  Description of Artificial Sequence: Synthetic peptide
AGKEEYSAM

SEQ ID NO: 1280 - protein, 10 aa, Artificial Sequence
  Description of Artificial Sequence: Synthetic peptide
AGKEEYSAMR

SEQ ID NO: 1281 - protein, 9 aa, Artificial Sequence
  Description of Artificial Sequence: Synthetic peptide
DILDTAGKE

SEQ ID NO: 1282 - protein, 11 aa, Artificial Sequence
  Description of Artificial Sequence: Synthetic peptide
DILDTAGKEEY

SEQ ID NO: 1283 - protein, 8 aa, Artificial Sequence
  Description of Artificial Sequence: Synthetic peptide
DTAGKEEY

SEQ ID NO: 1284 - protein, 9 aa, Artificial Sequence
  Description of Artificial Sequence: Synthetic peptide
DTAGKEEYS

SEQ ID NO: 1285 - protein, 11 aa, Artificial Sequence
  Description of Artificial Sequence: Synthetic peptide
DTAGKEEYSAM

SEQ ID NO: 1286 - protein, 12 aa, Artificial Sequence
  Description of Artificial Sequence: Synthetic peptide
DTAGKEEYSAMR

SEQ ID NO: 1287 - protein, 13 aa, Artificial Sequence
  Description of Artificial Sequence: Synthetic peptide
DTAGKEEYSAMRD

SEQ ID NO: 1288 - protein, 9 aa, Artificial Sequence
  Description of Artificial Sequence: Synthetic peptide
GKEEYSAMR

SEQ ID NO: 1289 - protein, 9 aa, Artificial Sequence
  Description of Artificial Sequence: Synthetic peptide
ILDTAGKEE

SEQ ID NO: 1290 - protein, 10 aa, Artificial Sequence
  Description of Artificial Sequence: Synthetic peptide
ILDTAGKEEY

SEQ ID NO: 1291 - protein, 14 aa, Artificial Sequence
  Description of Artificial Sequence: Synthetic peptide
ILDTAGKEEYSAMR

SEQ ID NO: 1292 - protein, 9 aa, Artificial Sequence
  Description of Artificial Sequence: Synthetic peptide
KEEYSAMRD

SEQ ID NO: 1293 - protein, 9 aa, Artificial Sequence
  Description of Artificial Sequence: Synthetic peptide
LDILDTAGK

SEQ ID NO: 1294 - protein, 9 aa, Artificial Sequence
  Description of Artificial Sequence: Synthetic peptide
LDTAGKEEY

SEQ ID NO: 1295 - protein, 13 aa, Artificial Sequence
  Description of Artificial Sequence: Synthetic peptide
LDTAGKEEYSAMR

SEQ ID NO: 1296 - protein, 8 aa, Artificial Sequence
  Description of Artificial Sequence: Synthetic peptide
TAGKEEYS

SEQ ID NO: 1297 - protein, 9 aa, Artificial Sequence
  Description of Artificial Sequence: Synthetic peptide
TAGKEEYSA

SEQ ID NO: 1298 - protein, 9 aa, Artificial Sequence
  Description of Artificial Sequence: Synthetic peptide
EVVRHCPHH

SEQ ID NO: 1299 - protein, 11 aa, Artificial Sequence
  Description of Artificial Sequence: Synthetic peptide
EVVRHCPHHER

SEQ ID NO: 1300 - protein, 9 aa, Artificial Sequence
  Description of Artificial Sequence: Synthetic peptide
HCPHHERCS

SEQ ID NO: 1301 - protein, 9 aa, Artificial Sequence
  Description of Artificial Sequence: Synthetic peptide
HMTEVVRHC

SEQ ID NO: 1302 - protein, 14 aa, Artificial Sequence
  Description of Artificial Sequence: Synthetic peptide
HMTEVVRHCPHHER

SEQ ID NO: 1303 - protein, 9 aa, Artificial Sequence
  Description of Artificial Sequence: Synthetic peptide
MTEVVRHCP

SEQ ID NO: 1304 - protein, 13 aa, Artificial Sequence
  Description of Artificial Sequence: Synthetic peptide
MTEVVRHCPHHER

SEQ ID NO: 1305 - protein, 14 aa, Artificial Sequence
  Description of Artificial Sequence: Synthetic peptide
MTEVVRHCPHHERC

SEQ ID NO: 1306 - protein, 9 aa, Artificial Sequence
  Description of Artificial Sequence: Synthetic peptide
QHMTEVVRH

SEQ ID NO: 1307 - protein, 8 aa, Artificial Sequence
  Description of Artificial Sequence: Synthetic peptide
RHCPHHER

SEQ ID NO: 1308 - protein, 9 aa, Artificial Sequence
  Description of Artificial Sequence: Synthetic peptide
RHCPHHERC

SEQ ID NO: 1309 - protein, 8 aa, Artificial Sequence
  Description of Artificial Sequence: Synthetic peptide
TEVVRHCP

SEQ ID NO: 1310 - protein, 9 aa, Artificial Sequence
  Description of Artificial Sequence: Synthetic peptide
TEVVRHCPH

SEQ ID NO: 1311 - protein, 12 aa, Artificial Sequence
  Description of Artificial Sequence: Synthetic peptide
TEVVRHCPHHER

SEQ ID NO: 1312 - protein, 9 aa, Artificial Sequence
  Description of Artificial Sequence: Synthetic peptide
VRHCPHHER

SEQ ID NO: 1313 - protein, 9 aa, Artificial Sequence
  Description of Artificial Sequence: Synthetic peptide
VVRHCPHHE

SEQ ID NO: 1314 - protein, 10 aa, Artificial Sequence
  Description of Artificial Sequence: Synthetic peptide
VVRHCPHHER

SEQ ID NO: 1315 - protein, 8 aa, Artificial Sequence
  Description of Artificial Sequence: Synthetic peptide
CMGGMNQR

SEQ ID NO: 1316 - protein, 9 aa, Artificial Sequence
  Description of Artificial Sequence: Synthetic peptide
CMGGMNQRP

SEQ ID NO: 1317 - protein, 9 aa, Artificial Sequence
  Description of Artificial Sequence: Synthetic peptide
GGMNQRPIL

SEQ ID NO: 1318 - protein, 11 aa, Artificial Sequence
  Description of Artificial Sequence: Synthetic peptide
GGMNQRPILTI

SEQ ID NO: 1319 - protein, 9 aa, Artificial Sequence
  Description of Artificial Sequence: Synthetic peptide
GMNQRPILT

SEQ ID NO: 1320 - protein, 10 aa, Artificial Sequence
  Description of Artificial Sequence: Synthetic peptide
GMNQRPILTI

SEQ ID NO: 1321 - protein, 11 aa, Artificial Sequence
  Description of Artificial Sequence: Synthetic peptide
GMNQRPILTII

SEQ ID NO: 1322 - protein, 8 aa, Artificial Sequence
  Description of Artificial Sequence: Synthetic peptide
MGGMNQRP

SEQ ID NO: 1323 - protein, 9 aa, Artificial Sequence
  Description of Artificial Sequence: Synthetic peptide
MGGMNQRPI

SEQ ID NO: 1324 - protein, 10 aa, Artificial Sequence
  Description of Artificial Sequence: Synthetic peptide
MGGMNQRPIL

SEQ ID NO: 1325 - protein, 9 aa, Artificial Sequence
  Description of Artificial Sequence: Synthetic peptide
MNQRPILTI

SEQ ID NO: 1326 - protein, 9 aa, Artificial Sequence
  Description of Artificial Sequence: Synthetic peptide
NQRPILTII

SEQ ID NO: 1327 - protein, 10 aa, Artificial Sequence
  Description of Artificial Sequence: Synthetic peptide
NQRPILTIIT

SEQ ID NO: 1328 - protein, 9 aa, Artificial Sequence
  Description of Artificial Sequence: Synthetic peptide
QRPILTIIT

SEQ ID NO: 1329 - protein, 9 aa, Artificial Sequence
  Description of Artificial Sequence: Synthetic peptide
SCMGGMNQR

SEQ ID NO: 1330 - protein, 9 aa, Artificial Sequence
  Description of Artificial Sequence: Synthetic peptide
SSCMGGMNQ

SEQ ID NO: 1331 - protein, 10 aa, Artificial Sequence
  Description of Artificial Sequence: Synthetic peptide
SSCMGGMNQR

SEQ ID NO: 1332 - protein, 11 aa, Artificial Sequence
  Description of Artificial Sequence: Synthetic peptide
SSCMGGMNQRP

SEQ ID NO: 1333 - protein, 9 aa, Artificial Sequence
  Description of Artificial Sequence: Synthetic peptide
CVCACPGRD

SEQ ID NO: 1334 - protein, 9 aa, Artificial Sequence
  Description of Artificial Sequence: Synthetic peptide
EVCVCACPG

SEQ ID NO: 1335 - protein, 10 aa, Artificial Sequence
  Description of Artificial Sequence: Synthetic peptide
EVCVCACPGR

SEQ ID NO: 1336 - protein, 8 aa, Artificial Sequence
  Description of Artificial Sequence: Synthetic peptide
FEVCVCAC

SEQ ID NO: 1337 - protein, 9 aa, Artificial Sequence
  Description of Artificial Sequence: Synthetic peptide
FEVCVCACP

SEQ ID NO: 1338 - protein, 9 aa, Artificial Sequence
  Description of Artificial Sequence: Synthetic peptide
GRNSFEVCV

SEQ ID NO: 1339 - protein, 9 aa, Artificial Sequence
  Description of Artificial Sequence: Synthetic peptide
LGRNSFEVC

SEQ ID NO: 1340 - protein, 9 aa, Artificial Sequence
  Description of Artificial Sequence: Synthetic peptide
NSFEVCVCA

SEQ ID NO: 1341 - protein, 10 aa, Artificial Sequence
  Description of Artificial Sequence: Synthetic peptide
NSFEVCVCAC

SEQ ID NO: 1342 - protein, 13 aa, Artificial Sequence
  Description of Artificial Sequence: Synthetic peptide
NSFEVCVCACPGR

SEQ ID NO: 1343 - protein, 9 aa, Artificial Sequence
  Description of Artificial Sequence: Synthetic peptide
RNSFEVCVC

SEQ ID NO: 1344 - protein, 14 aa, Artificial Sequence
  Description of Artificial Sequence: Synthetic peptide
RNSFEVCVCACPGR

SEQ ID NO: 1345 - protein, 9 aa, Artificial Sequence
  Description of Artificial Sequence: Synthetic peptide
SFEVCVCAC

SEQ ID NO: 1346 - protein, 9 aa, Artificial Sequence
  Description of Artificial Sequence: Synthetic peptide
VCVCACPGR

SEQ ID NO: 1347 - protein, 9 aa, Artificial Sequence
  Description of Artificial Sequence: Synthetic peptide
EVHVCACPG

SEQ ID NO: 1348 - protein, 10 aa, Artificial Sequence
  Description of Artificial Sequence: Synthetic peptide
EVHVCACPGR

SEQ ID NO: 1349 - protein, 8 aa, Artificial Sequence
  Description of Artificial Sequence: Synthetic peptide
FEVHVCAC

SEQ ID NO: 1350 - protein, 9 aa, Artificial Sequence
  Description of Artificial Sequence: Synthetic peptide
FEVHVCACP

SEQ ID NO: 1351 - protein, 9 aa, Artificial Sequence
  Description of Artificial Sequence: Synthetic peptide
GRNSFEVHV

SEQ ID NO: 1352 - protein, 9 aa, Artificial Sequence
  Description of Artificial Sequence: Synthetic peptide
HVCACPGRD

SEQ ID NO: 1353 - protein, 9 aa, Artificial Sequence
  Description of Artificial Sequence: Synthetic peptide
LGRNSFEVH

SEQ ID NO: 1354 - protein, 9 aa, Artificial Sequence
  Description of Artificial Sequence: Synthetic peptide
NSFEVHVCA

SEQ ID NO: 1355 - protein, 10 aa, Artificial Sequence
  Description of Artificial Sequence: Synthetic peptide
NSFEVHVCAC

SEQ ID NO: 1356 - protein, 13 aa, Artificial Sequence
  Description of Artificial Sequence: Synthetic peptide
NSFEVHVCACPGR

SEQ ID NO: 1357 - protein, 9 aa, Artificial Sequence
  Description of Artificial Sequence: Synthetic peptide
RNSFEVHVC

SEQ ID NO: 1358 - protein, 14 aa, Artificial Sequence
  Description of Artificial Sequence: Synthetic peptide
RNSFEVHVCACPGR

SEQ ID NO: 1359 - protein, 9 aa, Artificial Sequence
  Description of Artificial Sequence: Synthetic peptide
SFEVHVCAC

SEQ ID NO: 1360 - protein, 9 aa, Artificial Sequence
  Description of Artificial Sequence: Synthetic peptide
VHVCACPGR

SEQ ID NO: 1361 - protein, 9 aa, Artificial Sequence
  Description of Artificial Sequence: Synthetic peptide
DPLSKITEQ

SEQ ID NO: 1362 - protein, 11 aa, Artificial Sequence
  Description of Artificial Sequence: Synthetic peptide
DPLSKITEQEK

SEQ ID NO: 1363 - protein, 8 aa, Artificial Sequence
  Description of Artificial Sequence: Synthetic peptide
ISTRDPLS

SEQ ID NO: 1364 - protein, 9 aa, Artificial Sequence
  Description of Artificial Sequence: Synthetic peptide
ISTRDPLSK

SEQ ID NO: 1365 - protein, 8 aa, Artificial Sequence
  Description of Artificial Sequence: Synthetic peptide
KITEQEKD

SEQ ID NO: 1366 - protein, 9 aa, Artificial Sequence
  Description of Artificial Sequence: Synthetic peptide
KITEQEKDF

SEQ ID NO: 1367 - protein, 9 aa, Artificial Sequence
  Description of Artificial Sequence: Synthetic peptide
LSKITEQEK

SEQ ID NO: 1368 - protein, 11 aa, Artificial Sequence
  Description of Artificial Sequence: Synthetic peptide
LSKITEQEKDF

SEQ ID NO: 1369 - protein, 9 aa, Artificial Sequence
  Description of Artificial Sequence: Synthetic peptide
PLSKITEQE

SEQ ID NO: 1370 - protein, 9 aa, Artificial Sequence
  Description of Artificial Sequence: Synthetic peptide
RDPLSKITE

SEQ ID NO: 1371 - protein, 9 aa, Artificial Sequence
  Description of Artificial Sequence: Synthetic peptide
SKITEQEKD

SEQ ID NO: 1372 - protein, 8 aa, Artificial Sequence
  Description of Artificial Sequence: Synthetic peptide
STRDPLSK

SEQ ID NO: 1373 - protein, 9 aa, Artificial Sequence
  Description of Artificial Sequence: Synthetic peptide
STRDPLSKI

SEQ ID NO: 1374 - protein, 11 aa, Artificial Sequence
  Description of Artificial Sequence: Synthetic peptide
STRDPLSKITE

SEQ ID NO: 1375 - protein, 9 aa, Artificial Sequence
  Description of Artificial Sequence: Synthetic peptide
TRDPLSKIT

SEQ ID NO: 1376 - protein, 11 aa, Artificial Sequence
  Description of Artificial Sequence: Synthetic peptide
TRDPLSKITEQ

SEQ ID NO: 1377 - protein, 11 aa, Artificial Sequence
  Description of Artificial Sequence: Synthetic peptide
STRDPLSEITK

SEQ ID NO: 1378 - protein, 9 aa, Artificial Sequence
  Description of Artificial Sequence: Synthetic peptide
DPLSEITKQ

SEQ ID NO: 1379 - protein, 11 aa, Artificial Sequence
  Description of Artificial Sequence: Synthetic peptide
DPLSEITKQEK

SEQ ID NO: 1380 - protein, 8 aa, Artificial Sequence
  Description of Artificial Sequence: Synthetic peptide
EITKQEKD

SEQ ID NO: 1381 - protein, 9 aa, Artificial Sequence
  Description of Artificial Sequence: Synthetic peptide
EITKQEKDF

SEQ ID NO: 1382 - protein, 9 aa, Artificial Sequence
  Description of Artificial Sequence: Synthetic peptide
ITKQEKDFL

SEQ ID NO: 1383 - protein, 11 aa, Artificial Sequence
  Description of Artificial Sequence: Synthetic peptide
ITKQEKDFLWS

SEQ ID NO: 1384 - protein, 8 aa, Artificial Sequence
  Description of Artificial Sequence: Synthetic peptide
KQEKDFLW

SEQ ID NO: 1385 - protein, 9 aa, Artificial Sequence
  Description of Artificial Sequence: Synthetic peptide
KQEKDFLWS

SEQ ID NO: 1386 - protein, 9 aa, Artificial Sequence
  Description of Artificial Sequence: Synthetic peptide
LSEITKQEK

SEQ ID NO: 1387 - protein, 13 aa, Artificial Sequence
  Description of Artificial Sequence: Synthetic peptide
LSEITKQEKDFLW

SEQ ID NO: 1388 - protein, 9 aa, Artificial Sequence
  Description of Artificial Sequence: Synthetic peptide
PLSEITKQE

SEQ ID NO: 1389 - protein, 8 aa, Artificial Sequence
  Description of Artificial Sequence: Synthetic peptide
QEKDFLWS

SEQ ID NO: 1390 - protein, 9 aa, Artificial Sequence
  Description of Artificial Sequence: Synthetic peptide
RDPLSEITK

SEQ ID NO: 1391 - protein, 8 aa, Artificial Sequence
  Description of Artificial Sequence: Synthetic peptide
SEITKQEK

SEQ ID NO: 1392 - protein, 9 aa, Artificial Sequence
  Description of Artificial Sequence: Synthetic peptide
SEITKQEKD

SEQ ID NO: 1393 - protein, 10 aa, Artificial Sequence
  Description of Artificial Sequence: Synthetic peptide
SEITKQEKDF

SEQ ID NO: 1394 - protein, 12 aa, Artificial Sequence
  Description of Artificial Sequence: Synthetic peptide
SEITKQEKDFLW

SEQ ID NO: 1395 - protein, 13 aa, Artificial Sequence
  Description of Artificial Sequence: Synthetic peptide
SEITKQEKDFLWS

SEQ ID NO: 1396 - protein, 8 aa, Artificial Sequence
  Description of Artificial Sequence: Synthetic peptide
TKQEKDFL

SEQ ID NO: 1397 - protein, 9 aa, Artificial Sequence
  Description of Artificial Sequence: Synthetic peptide
TKQEKDFLW

SEQ ID NO: 1398 - protein, 9 aa, Artificial Sequence
  Description of Artificial Sequence: Synthetic peptide
ARHGGWTTK

SEQ ID NO: 1399 - protein, 10 aa, Artificial Sequence
  Description of Artificial Sequence: Synthetic peptide
ARHGGWTTKM

SEQ ID NO: 1400 - protein, 9 aa, Artificial Sequence
  Description of Artificial Sequence: Synthetic peptide
DARHGGWTT

SEQ ID NO: 1401 - protein, 9 aa, Artificial Sequence
  Description of Artificial Sequence: Synthetic peptide
FMKQMNDAR

SEQ ID NO: 1402 - protein, 11 aa, Artificial Sequence
  Description of Artificial Sequence: Synthetic peptide
FMKQMNDARHG

SEQ ID NO: 1403 - protein, 8 aa, Artificial Sequence
  Description of Artificial Sequence: Synthetic peptide
HGGWTTKM

SEQ ID NO: 1404 - protein, 9 aa, Artificial Sequence
  Description of Artificial Sequence: Synthetic peptide
KQMNDARHG

SEQ ID NO: 1405 - protein, 14 aa, Artificial Sequence
  Description of Artificial Sequence: Synthetic peptide
KQMNDARHGGWTTK

SEQ ID NO: 1406 - protein, 9 aa, Artificial Sequence
  Description of Artificial Sequence: Synthetic peptide
MKQMNDARH

SEQ ID NO: 1407 - protein, 10 aa, Artificial Sequence
  Description of Artificial Sequence: Synthetic peptide
MKQMNDARHG

SEQ ID NO: 1408 - protein, 9 aa, Artificial Sequence
  Description of Artificial Sequence: Synthetic peptide
MNDARHGGW

SEQ ID NO: 1409 - protein, 9 aa, Artificial Sequence
  Description of Artificial Sequence: Synthetic peptide
NDARHGGWT

SEQ ID NO: 1410 - protein, 11 aa, Artificial Sequence
  Description of Artificial Sequence: Synthetic peptide
NDARHGGWTTK

SEQ ID NO: 1411 - protein, 9 aa, Artificial Sequence
  Description of Artificial Sequence: Synthetic peptide
QMNDARHGG

SEQ ID NO: 1412 - protein, 10 aa, Artificial Sequence
  Description of Artificial Sequence: Synthetic peptide
QMNDARHGGW

SEQ ID NO: 1413 - protein, 11 aa, Artificial Sequence
  Description of Artificial Sequence: Synthetic peptide
QMNDARHGGWT

SEQ ID NO: 1414 - protein, 8 aa, Artificial Sequence
  Description of Artificial Sequence: Synthetic peptide
RHGGWTTK

SEQ ID NO: 1415 - protein, 9 aa, Artificial Sequence
  Description of Artificial Sequence: Synthetic peptide
RHGGWTTKM

SEQ ID NO: 1416 - protein, 9 aa, Artificial Sequence
  Description of Artificial Sequence: Synthetic peptide
CSDDTRMVR

SEQ ID NO: 1417 - protein, 10 aa, Artificial Sequence
  Description of Artificial Sequence: Synthetic peptide
CSDDTRMVRR

SEQ ID NO: 1418 - protein, 9 aa, Artificial Sequence
  Description of Artificial Sequence: Synthetic peptide
DDTRMVRRA

SEQ ID NO: 1419 - protein, 9 aa, Artificial Sequence
  Description of Artificial Sequence: Synthetic peptide
DTRMVRRAA

SEQ ID NO: 1420 - protein, 10 aa, Artificial Sequence
  Description of Artificial Sequence: Synthetic peptide
DTRMVRRAAA

SEQ ID NO: 1421 - protein, 11 aa, Artificial Sequence
  Description of Artificial Sequence: Synthetic peptide
DTRMVRRAAAS

SEQ ID NO: 1422 - protein, 9 aa, Artificial Sequence
  Description of Artificial Sequence: Synthetic peptide
LCSDDTRMV

SEQ ID NO: 1423 - protein, 10 aa, Artificial Sequence
  Description of Artificial Sequence: Synthetic peptide
LCSDDTRMVR

SEQ ID NO: 1424 - protein, 9 aa, Artificial Sequence
  Description of Artificial Sequence: Synthetic peptide
NLCSDDTRM

SEQ ID NO: 1425 - protein, 10 aa, Artificial Sequence
  Description of Artificial Sequence: Synthetic peptide
NLCSDDTRMV

SEQ ID NO: 1426 - protein, 8 aa, Artificial Sequence
  Description of Artificial Sequence: Synthetic peptide
RMVRRAAA

SEQ ID NO: 1427 - protein, 9 aa, Artificial Sequence
  Description of Artificial Sequence: Synthetic peptide
RMVRRAAAS

SEQ ID NO: 1428 - protein, 9 aa, Artificial Sequence
  Description of Artificial Sequence: Synthetic peptide
RNLCSDDTR

SEQ ID NO: 1429 - protein, 13 aa, Artificial Sequence
  Description of Artificial Sequence: Synthetic peptide
RNLCSDDTRMVRR

SEQ ID NO: 1430 - protein, 9 aa, Artificial Sequence
  Description of Artificial Sequence: Synthetic peptide
SDDTRMVRR

SEQ ID NO: 1431 - protein, 8 aa, Artificial Sequence
  Description of Artificial Sequence: Synthetic peptide
TRMVRRAA

SEQ ID NO: 1432 - protein, 9 aa, Artificial Sequence
  Description of Artificial Sequence: Synthetic peptide
TRMVRRAAA

SEQ ID NO: 1433 - protein, 9 aa, Artificial Sequence
  Description of Artificial Sequence: Synthetic peptide
AGKGGTGVM

SEQ ID NO: 1434 - protein, 11 aa, Artificial Sequence
  Description of Artificial Sequence: Synthetic peptide
AGKGGTGVMIC

SEQ ID NO: 1435 - protein, 9 aa, Artificial Sequence
  Description of Artificial Sequence: Synthetic peptide
CKAGKGGTG

SEQ ID NO: 1436 - protein, 10 aa, Artificial Sequence
  Description of Artificial Sequence: Synthetic peptide
CKAGKGGTGV

SEQ ID NO: 1437 - protein, 9 aa, Artificial Sequence
  Description of Artificial Sequence: Synthetic peptide
GGTGVMICA

SEQ ID NO: 1438 - protein, 10 aa, Artificial Sequence
  Description of Artificial Sequence: Synthetic peptide
GGTGVMICAY

SEQ ID NO: 1439 - protein, 9 aa, Artificial Sequence
  Description of Artificial Sequence: Synthetic peptide
GKGGTGVMI

SEQ ID NO: 1440 - protein, 8 aa, Artificial Sequence
  Description of Artificial Sequence: Synthetic peptide
GTGVMICA

SEQ ID NO: 1441 - protein, 9 aa, Artificial Sequence
  Description of Artificial Sequence: Synthetic peptide
GTGVMICAY

SEQ ID NO: 1442 - protein, 9 aa, Artificial Sequence
  Description of Artificial Sequence: Synthetic peptide
HCKAGKGGT

SEQ ID NO: 1443 - protein, 11 aa, Artificial Sequence
  Description of Artificial Sequence: Synthetic peptide
HCKAGKGGTGV

SEQ ID NO: 1444 - protein, 9 aa, Artificial Sequence
  Description of Artificial Sequence: Synthetic peptide
IHCKAGKGG

SEQ ID NO: 1445 - protein, 9 aa, Artificial Sequence
  Description of Artificial Sequence: Synthetic peptide
KAGKGGTGV

SEQ ID NO: 1446 - protein, 8 aa, Artificial Sequence
  Description of Artificial Sequence: Synthetic peptide
KGGTGVMI

SEQ ID NO: 1447 - protein, 9 aa, Artificial Sequence
  Description of Artificial Sequence: Synthetic peptide
KGGTGVMIC

SEQ ID NO: 1448 - protein, 11 aa, Artificial Sequence
  Description of Artificial Sequence: Synthetic peptide
KGGTGVMICAY

SEQ ID NO: 1449 - protein, 9 aa, Artificial Sequence
  Description of Artificial Sequence: Synthetic peptide
AGKGQTGVM

SEQ ID NO: 1450 - protein, 11 aa, Artificial Sequence
  Description of Artificial Sequence: Synthetic peptide
AGKGQTGVMIC

SEQ ID NO: 1451 - protein, 9 aa, Artificial Sequence
  Description of Artificial Sequence: Synthetic peptide
CKAGKGQTG

SEQ ID NO: 1452 - protein, 9 aa, Artificial Sequence
  Description of Artificial Sequence: Synthetic peptide
GKGQTGVMI

SEQ ID NO: 1453 - protein, 9 aa, Artificial Sequence
  Description of Artificial Sequence: Synthetic peptide
GQTGVMICA

SEQ ID NO: 1454 - protein, 10 aa, Artificial Sequence
  Description of Artificial Sequence: Synthetic peptide
GQTGVMICAY

SEQ ID NO: 1455 - protein, 9 aa, Artificial Sequence
  Description of Artificial Sequence: Synthetic peptide
HCKAGKGQT

SEQ ID NO: 1456 - protein, 9 aa, Artificial Sequence
  Description of Artificial Sequence: Synthetic peptide
IHCKAGKGQ

SEQ ID NO: 1457 - protein, 9 aa, Artificial Sequence
  Description of Artificial Sequence: Synthetic peptide
KAGKGQTGV

SEQ ID NO: 1458 - protein, 9 aa, Artificial Sequence
  Description of Artificial Sequence: Synthetic peptide
KGQTGVMIC

SEQ ID NO: 1459 - protein, 11 aa, Artificial Sequence
  Description of Artificial Sequence: Synthetic peptide
KGQTGVMICAY

SEQ ID NO: 1460 - protein, 8 aa, Artificial Sequence
  Description of Artificial Sequence: Synthetic peptide
QTGVMICA

SEQ ID NO: 1461 - protein, 9 aa, Artificial Sequence
  Description of Artificial Sequence: Synthetic peptide
QTGVMICAY

SEQ ID NO: 1462 - protein, 8 aa, Artificial Sequence
  Description of Artificial Sequence: Synthetic peptide
ALGPRMQL

SEQ ID NO: 1463 - protein, 9 aa, Artificial Sequence
  Description of Artificial Sequence: Synthetic peptide
ALGPRMQLC

SEQ ID NO: 1464 - protein, 11 aa, Artificial Sequence
  Description of Artificial Sequence: Synthetic peptide
ALGPRMQLCTQ

SEQ ID NO: 1465 - protein, 14 aa, Artificial Sequence
  Description of Artificial Sequence: Synthetic peptide
ALGPRMQLCTQLAR

SEQ ID NO: 1466 - protein, 9 aa, Artificial Sequence
  Description of Artificial Sequence: Synthetic peptide
ARFFPITPP

SEQ ID NO: 1467 - protein, 10 aa, Artificial Sequence
  Description of Artificial Sequence: Synthetic peptide
ARFFPITPPV

SEQ ID NO: 1468 - protein, 14 aa, Artificial Sequence
  Description of Artificial Sequence: Synthetic peptide
ARFFPITPPVWHIL

SEQ ID NO: 1469 - protein, 9 aa, Artificial Sequence
  Description of Artificial Sequence: Synthetic peptide
CTQLARFFP

SEQ ID NO: 1470 - protein, 10 aa, Artificial Sequence
  Description of Artificial Sequence: Synthetic peptide
CTQLARFFPI

SEQ ID NO: 1471 - protein, 14 aa, Artificial Sequence
  Description of Artificial Sequence: Synthetic peptide
CTQLARFFPITPPV

SEQ ID NO: 1472 - protein, 8 aa, Artificial Sequence
  Description of Artificial Sequence: Synthetic peptide
FFPITPPV

SEQ ID NO: 1473 - protein, 9 aa, Artificial Sequence
  Description of Artificial Sequence: Synthetic peptide
FFPITPPVW

SEQ ID NO: 1474 - protein, 9 aa, Artificial Sequence
  Description of Artificial Sequence: Synthetic peptide
FPITPPVWH

SEQ ID NO: 1475 - protein, 10 aa, Artificial Sequence
  Description of Artificial Sequence: Synthetic peptide
FPITPPVWHI

SEQ ID NO: 1476 - protein, 9 aa, Artificial Sequence
  Description of Artificial Sequence: Synthetic peptide
GPRMQLCTQ

SEQ ID NO: 1477 - protein, 10 aa, Artificial Sequence
  Description of Artificial Sequence: Synthetic peptide
GPRMQLCTQL

SEQ ID NO: 1478 - protein, 12 aa, Artificial Sequence
  Description of Artificial Sequence: Synthetic peptide
GPRMQLCTQLAR

SEQ ID NO: 1479 - protein, 9 aa, Artificial Sequence
  Description of Artificial Sequence: Synthetic peptide
GVPPSPPLA

SEQ ID NO: 1480 - protein, 10 aa, Artificial Sequence
  Description of Artificial Sequence: Synthetic peptide
GVPPSPPLAL

SEQ ID NO: 1481 - protein, 9 aa, Artificial Sequence
  Description of Artificial Sequence: Synthetic peptide
HILGPQRHT

SEQ ID NO: 1482 - protein, 8 aa, Artificial Sequence
  Description of Artificial Sequence: Synthetic peptide
HPQRKRRG

SEQ ID NO: 1483 - protein, 9 aa, Artificial Sequence
  Description of Artificial Sequence: Synthetic peptide
HPQRKRRGV

SEQ ID NO: 1484 - protein, 10 aa, Artificial Sequence
  Description of Artificial Sequence: Synthetic peptide
HPQRKRRGVP

SEQ ID NO: 1485 - protein, 8 aa, Artificial Sequence
  Description of Artificial Sequence: Synthetic peptide
ILGPQRHT

SEQ ID NO: 1486 - protein, 9 aa, Artificial Sequence
  Description of Artificial Sequence: Synthetic peptide
ILGPQRHTP

SEQ ID NO: 1487 - protein, 9 aa, Artificial Sequence
  Description of Artificial Sequence: Synthetic peptide
ITPPVWHIL

SEQ ID NO: 1488 - protein, 8 aa, Artificial Sequence
  Description of Artificial Sequence: Synthetic peptide
KRRGVPPS

SEQ ID NO: 1489 - protein, 9 aa, Artificial Sequence
  Description of Artificial Sequence: Synthetic peptide
KRRGVPPSP

SEQ ID NO: 1490 - protein, 9 aa, Artificial Sequence
  Description of Artificial Sequence: Synthetic peptide
LALGPRMQL

SEQ ID NO: 1491 - protein, 13 aa, Artificial Sequence
  Description of Artificial Sequence: Synthetic peptide
LALGPRMQLCTQL

SEQ ID NO: 1492 - protein, 9 aa, Artificial Sequence
  Description of Artificial Sequence: Synthetic peptide
LARFFPITP

SEQ ID NO: 1493 - protein, 9 aa, Artificial Sequence
  Description of Artificial Sequence: Synthetic peptide
LCTQLARFF

SEQ ID NO: 1494 - protein, 9 aa, Artificial Sequence
  Description of Artificial Sequence: Synthetic peptide
LGPRMQLCT

SEQ ID NO: 1495 - protein, 11 aa, Artificial Sequence
  Description of Artificial Sequence: Synthetic peptide
LGPRMQLCTQL

SEQ ID NO: 1496 - protein, 13 aa, Artificial Sequence
  Description of Artificial Sequence: Synthetic peptide
LGPRMQLCTQLAR

SEQ ID NO: 1497 - protein, 9 aa, Artificial Sequence
  Description of Artificial Sequence: Synthetic peptide
MQLCTQLAR

SEQ ID NO: 1498 - protein, 10 aa, Artificial Sequence
  Description of Artificial Sequence: Synthetic peptide
MQLCTQLARF

SEQ ID NO: 1499 - protein, 11 aa, Artificial Sequence
  Description of Artificial Sequence: Synthetic peptide
MQLCTQLARFF

SEQ ID NO: 1500 - protein, 13 aa, Artificial Sequence
  Description of Artificial Sequence: Synthetic peptide
MQLCTQLARFFPI

SEQ ID NO: 1501 - protein, 9 aa, Artificial Sequence
  Description of Artificial Sequence: Synthetic peptide
PITPPVWHI

SEQ ID NO: 1502 - protein, 14 aa, Artificial Sequence
  Description of Artificial Sequence: Synthetic peptide
PITPPVWHILGPQR

SEQ ID NO: 1503 - protein, 9 aa, Artificial Sequence
  Description of Artificial Sequence: Synthetic peptide
PLALGPRMQ

SEQ ID NO: 1504 - protein, 9 aa, Artificial Sequence
  Description of Artificial Sequence: Synthetic peptide
PPLALGPRM

SEQ ID NO: 1505 - protein, 9 aa, Artificial Sequence
  Description of Artificial Sequence: Synthetic peptide
PPSPPLALG

SEQ ID NO: 1506 - protein, 14 aa, Artificial Sequence
  Description of Artificial Sequence: Synthetic peptide
PPSPPLALGPRMQL

SEQ ID NO: 1507 - protein, 9 aa, Artificial Sequence
  Description of Artificial Sequence: Synthetic peptide
PPVWHILGP

SEQ ID NO: 1508 - protein, 8 aa, Artificial Sequence
  Description of Artificial Sequence: Synthetic peptide
PQRKRRGV

SEQ ID NO: 1509 - protein, 9 aa, Artificial Sequence
  Description of Artificial Sequence: Synthetic peptide
PQRKRRGVP

SEQ ID NO: 1510 - protein, 10 aa, Artificial Sequence
  Description of Artificial Sequence: Synthetic peptide
PQRKRRGVPP

SEQ ID NO: 1511 - protein, 9 aa, Artificial Sequence
  Description of Artificial Sequence: Synthetic peptide
PRMQLCTQL

SEQ ID NO: 1512 - protein, 10 aa, Artificial Sequence
  Description of Artificial Sequence: Synthetic peptide
PRMQLCTQLA

SEQ ID NO: 1513 - protein, 11 aa, Artificial Sequence
  Description of Artificial Sequence: Synthetic peptide
PRMQLCTQLAR

SEQ ID NO: 1514 - protein, 9 aa, Artificial Sequence
  Description of Artificial Sequence: Synthetic peptide
PSPPLALGP

SEQ ID NO: 1515 - protein, 13 aa, Artificial Sequence
  Description of Artificial Sequence: Synthetic peptide
PSPPLALGPRMQL

SEQ ID NO: 1516 - protein, 9 aa, Artificial Sequence
  Description of Artificial Sequence: Synthetic peptide
PVWHILGPQ

SEQ ID NO: 1517 - protein, 8 aa, Artificial Sequence
  Description of Artificial Sequence: Synthetic peptide
QLARFFPI

SEQ ID NO: 1518 - protein, 9 aa, Artificial Sequence
  Description of Artificial Sequence: Synthetic peptide
QLARFFPIT

SEQ ID NO: 1519 - protein, 10 aa, Artificial Sequence
  Description of Artificial Sequence: Synthetic peptide
QLARFFPITP

SEQ ID NO: 1520 - protein, 12 aa, Artificial Sequence
  Description of Artificial Sequence: Synthetic peptide
QLARFFPITPPV

SEQ ID NO: 1521 - protein, 13 aa, Artificial Sequence
  Description of Artificial Sequence: Synthetic peptide
QLARFFPITPPVW

SEQ ID NO: 1522 - protein, 9 aa, Artificial Sequence
  Description of Artificial Sequence: Synthetic peptide
QLCTQLARF

SEQ ID NO: 1523 - protein, 10 aa, Artificial Sequence
  Description of Artificial Sequence: Synthetic peptide
QLCTQLARFF

SEQ ID NO: 1524 - protein, 9 aa, Artificial Sequence
  Description of Artificial Sequence: Synthetic peptide
QRKRRGVPP

SEQ ID NO: 1525 - protein, 10 aa, Artificial Sequence
  Description of Artificial Sequence: Synthetic peptide
QRKRRGVPPS

SEQ ID NO: 1526 - protein, 11 aa, Artificial Sequence
  Description of Artificial Sequence: Synthetic peptide
QRKRRGVPPSP

SEQ ID NO: 1527 - protein, 9 aa, Artificial Sequence
  Description of Artificial Sequence: Synthetic peptide
RFFPITPPV

SEQ ID NO: 1528 - protein, 10 aa, Artificial Sequence
  Description of Artificial Sequence: Synthetic peptide
RFFPITPPVW

SEQ ID NO: 1529 - protein, 13 aa, Artificial Sequence
  Description of Artificial Sequence: Synthetic peptide
RFFPITPPVWHIL

SEQ ID NO: 1530 - protein, 9 aa, Artificial Sequence
  Description of Artificial Sequence: Synthetic peptide
RGVPPSPPL

SEQ ID NO: 1531 - protein, 9 aa, Artificial Sequence
  Description of Artificial Sequence: Synthetic peptide
RKRRGVPPS

SEQ ID NO: 1532 - protein, 10 aa, Artificial Sequence
  Description of Artificial Sequence: Synthetic peptide
RKRRGVPPSP

SEQ ID NO: 1533 - protein, 9 aa, Artificial Sequence
  Description of Artificial Sequence: Synthetic peptide
RMQLCTQLA

SEQ ID NO: 1534 - protein, 10 aa, Artificial Sequence
  Description of Artificial Sequence: Synthetic peptide
RMQLCTQLAR

SEQ ID NO: 1535 - protein, 14 aa, Artificial Sequence
  Description of Artificial Sequence: Synthetic peptide
RMQLCTQLARFFPI

SEQ ID NO: 1536 - protein, 8 aa, Artificial Sequence
  Description of Artificial Sequence: Synthetic peptide
RRGVPPSP

SEQ ID NO: 1537 - protein, 9 aa, Artificial Sequence
  Description of Artificial Sequence: Synthetic peptide
RRGVPPSPP

SEQ ID NO: 1538 - protein, 10 aa, Artificial Sequence
  Description of Artificial Sequence: Synthetic peptide
RRGVPPSPPL

SEQ ID NO: 1539 - protein, 8 aa, Artificial Sequence
  Description of Artificial Sequence: Synthetic peptide
SPPLALGP

SEQ ID NO: 1540 - protein, 9 aa, Artificial Sequence
  Description of Artificial Sequence: Synthetic peptide
SPPLALGPR

SEQ ID NO: 1541 - protein, 10 aa, Artificial Sequence
  Description of Artificial Sequence: Synthetic peptide
SPPLALGPRM

SEQ ID NO: 1542 - protein, 11 aa, Artificial Sequence
  Description of Artificial Sequence: Synthetic peptide
SPPLALGPRMQ

SEQ ID NO: 1543 - protein, 12 aa, Artificial Sequence
  Description of Artificial Sequence: Synthetic peptide
SPPLALGPRMQL

SEQ ID NO: 1544 - protein, 13 aa, Artificial Sequence
  Description of Artificial Sequence: Synthetic peptide
SPPLALGPRMQLC

SEQ ID NO: 1545 - protein, 14 aa, Artificial Sequence
  Description of Artificial Sequence: Synthetic peptide
SPPLALGPRMQLCT

SEQ ID NO: 1546 - protein, 8 aa, Artificial Sequence
  Description of Artificial Sequence: Synthetic peptide
TPPVWHIL

SEQ ID NO: 1547 - protein, 9 aa, Artificial Sequence
  Description of Artificial Sequence: Synthetic peptide
TPPVWHILG

SEQ ID NO: 1548 - protein, 11 aa, Artificial Sequence
  Description of Artificial Sequence: Synthetic peptide
TPPVWHILGPQ

SEQ ID NO: 1549 - protein, 9 aa, Artificial Sequence
  Description of Artificial Sequence: Synthetic peptide
TQLARFFPI

SEQ ID NO: 1550 - protein, 10 aa, Artificial Sequence
  Description of Artificial Sequence: Synthetic peptide
TQLARFFPIT

SEQ ID NO: 1551 - protein, 13 aa, Artificial Sequence
  Description of Artificial Sequence: Synthetic peptide
TQLARFFPITPPV

SEQ ID NO: 1552 - protein, 9 aa, Artificial Sequence
  Description of Artificial Sequence: Synthetic peptide
VPPSPPLAL

SEQ ID NO: 1553 - protein, 9 aa, Artificial Sequence
  Description of Artificial Sequence: Synthetic peptide
VWHILGPQR

SEQ ID NO: 1554 - protein, 9 aa, Artificial Sequence
  Description of Artificial Sequence: Synthetic peptide
WHILGPQRH

SEQ ID NO: 1555 - protein, 9 aa, Artificial Sequence
  Description of Artificial Sequence: Synthetic peptide
DYLALNEDL

SEQ ID NO: 1556 - protein, 9 aa, Artificial Sequence
  Description of Artificial Sequence: Synthetic peptide
RYLENGKEM

SEQ ID NO: 1557 - protein, 10 aa, Artificial Sequence
  Description of Artificial Sequence: Synthetic peptide
RYAYDGKDYL

SEQ ID NO: 1558 - protein, 10 aa, Artificial Sequence
  Description of Artificial Sequence: Synthetic peptide
AYDGKDYLAL

SEQ ID NO: 1559 - protein, 9 aa, Artificial Sequence
  Description of Artificial Sequence: Synthetic peptide
PFPQPELPY

SEQ ID NO: 1560 - protein, 9 aa, Artificial Sequence
  Description of Artificial Sequence: Synthetic peptide
PQPELPYPQ

SEQ ID NO: 1561 - protein, 9 aa, Artificial Sequence
  Description of Artificial Sequence: Synthetic peptide
PYPQPELPY

SEQ ID NO: 1562 - protein, 9 aa, Artificial Sequence
  Description of Artificial Sequence: Synthetic peptide
FRPEQPYPQ

SEQ ID NO: 1563 - protein, 9 aa, Artificial Sequence
  Description of Artificial Sequence: Synthetic peptide
PQQSFPEQQ

SEQ ID NO: 1564 - protein, 9 aa, Artificial Sequence
  Description of Artificial Sequence: Synthetic peptide
QQPEQPYPQ

SEQ ID NO: 1565 - protein, 9 aa, Artificial Sequence
  Description of Artificial Sequence: Synthetic peptide
IQPEQPAQL

SEQ ID NO: 1566 - protein, 9 aa, Artificial Sequence
  Description of Artificial Sequence: Synthetic peptide
SQPEQEFPQ

SEQ ID NO: 1567 - protein, 9 aa, Artificial Sequence
  Description of Artificial Sequence: Synthetic peptide
PQPEQEFPQ

SEQ ID NO: 1568 - protein, 9 aa, Artificial Sequence
  Description of Artificial Sequence: Synthetic peptide
PQPEQPFCQ

SEQ ID NO: 1569 - protein, 9 aa, Artificial Sequence
  Description of Artificial Sequence: Synthetic peptide
QQPEQPFPQ

SEQ ID NO: 1570 - protein, 9 aa, Artificial Sequence
  Description of Artificial Sequence: Synthetic peptide
LQPEQPFPQ

SEQ ID NO: 1571 - protein, 9 aa, Artificial Sequence
  Description of Artificial Sequence: Synthetic peptide
QQPFPEQPQ

SEQ ID NO: 1572 - protein, 9 aa, Artificial Sequence
  Description of Artificial Sequence: Synthetic peptide
PFPQPEQPF

SEQ ID NO: 1573 - protein, 9 aa, Artificial Sequence
  Description of Artificial Sequence: Synthetic peptide
PQPEQPFPW

SEQ ID NO: 1574 - protein, 9 aa, Artificial Sequence
  Description of Artificial Sequence: Synthetic peptide
PFSEQEQPV

SEQ ID NO: 1575 - protein, 9 aa, Artificial Sequence
  Description of Artificial Sequence: Synthetic peptide
FSQQQESPF

SEQ ID NO: 1576 - protein, 9 aa, Artificial Sequence
  Description of Artificial Sequence: Synthetic peptide
PIPEQPQPY

SEQ ID NO: 1577 - protein, 9 aa, Artificial Sequence
  Description of Artificial Sequence: Synthetic peptide
PQPEQPFPQ

SEQ ID NO: 1578 - protein, 9 aa, Artificial Sequence
  Description of Artificial Sequence: Synthetic peptide
PYPEQPQPY

SEQ ID NO: 1579 - protein, 9 aa, Artificial Sequence
  Description of Artificial Sequence: Synthetic peptide
PFPEQPEQI

SEQ ID NO: 1580 - protein, 9 aa, Artificial Sequence
  Description of Artificial Sequence: Synthetic peptide
PYPEQEEPF

SEQ ID NO: 1581 - protein, 9 aa, Artificial Sequence
  Description of Artificial Sequence: Synthetic peptide
PYPEQEQPI

SEQ ID NO: 1582 - protein, 9 aa, Artificial Sequence
  Description of Artificial Sequence: Synthetic peptide
PYPEQEQPF

SEQ ID NO: 1583 - protein, 9 aa, Artificial Sequence
  Description of Artificial Sequence: Synthetic peptide
QGSVQPQQL

SEQ ID NO: 1584 - protein, 9 aa, Artificial Sequence
  Description of Artificial Sequence: Synthetic peptide
QYSQPEQPI

SEQ ID NO: 1585 - protein, 9 aa, Artificial Sequence
  Description of Artificial Sequence: Synthetic peptide
EGSFQPSQE

SEQ ID NO: 1586 - protein, 9 aa, Artificial Sequence
  Description of Artificial Sequence: Synthetic peptide
EQPQQPFPQ

SEQ ID NO: 1587 - protein, 9 aa, Artificial Sequence
  Description of Artificial Sequence: Synthetic peptide
EQPQQPYPE

SEQ ID NO: 1588 - protein, 9 aa, Artificial Sequence
  Description of Artificial Sequence: Synthetic peptide
PQQSFPEQE

SEQ ID NO: 1589 - protein, 9 aa, Artificial Sequence
  Description of Artificial Sequence: Synthetic peptide
QGYYPTSPQ

SEQ ID NO: 1590 - protein, 7 aa, Artificial Sequence
  Description of Artificial Sequence: Synthetic peptide
PRTPPPS

SEQ ID NO: 1591 - protein, 565 aa, Artificial Sequence
  Description of Artificial Sequence: Synthetic polypeptide
MSRSVALAVLALLSLSGLEAGDTRPRFLWQLKFECHFFNGTERVRLLERCIYNQEESVRFDSDVGEYRAVTELGRPDAEYWNSQKDLLEQRRAAVDTYCRHNYGVGESFTVQRRVEPKVTVYPSKTQPLQHHNLLVCSVSGFYPGSIEVRWFRNGQEEKAGVVSTGLIQNGDWTFQTLVMLETVPRSGEVYTCQVEHPSVTSPLTVEWRARSESAQSKTGSGGGGSGGGGSGGGGSGGGGSGTIKEEHVIIQAEFYLNPDQSGEFMFDFDGDEIFHVDMAKKETVWRLEEFGRFASFEAQGALANIAVDKANLEIMTKRSNYTPITNVPPEVTVLTNSPVELREPNVLICFIDKFTPPVVNVTWLRNGKPVTTGVSETVFLPREDHLFRKFHYLPFLPSTEDVYDCRVEHWGLDEPLLKHWEFDAPSPLPETTELSTTEVAMHTSTSSSVTKSYISSQTNDTHKRDTYAATPRAHEVSEISVRTVYPPEEETGERVQLAHHFSEPEITLIIFGVMAGVIGTILLISYGIRRLIKKSPSDVKPLPSPDTDVPLSSVEIENPETSDQ

SEQ ID NO: 1592 - protein, 573 aa, Artificial Sequence
  Description of Artificial Sequence: Synthetic polypeptide
MSRSVALAVLALLSLSGLEARATPENYLFQGRQECYAFNGTQRFLERYIYNREEFARFDSDVGEFRAVTELGRPAAEYWNSQKDILEEKRAVPDRMCRHNYELGGPMTLQRRVQPRVNVSPSKKGPLQHHNLLVCHVTDFYPGSIQVRWFLNGQEETAGVVSTNLIRNGDWTFQILVMLEMTPQQGDVYTCQVEHTSLDSPVTVEWKAQSDSARSKTLTGAGGTGSGGGGSGGGGSGGGGSGGGGSGTAGAIKADHVSTYAAFVQTHRPTGEFMFEFDEDEMFYVDLDKKETVWHLEEFGQAFSFEAQGGLANIAILNNNLNTLIQRSNHTQATNDPPEVTVFPKEPVELGQPNTLICHIDKFFPPVLNVTWLCNGELVTEGVAESLFLPRTDYSFHKFHYLTFVPSAEDFYDCRVEHWGLDQPLLKHWEAQEPIQMPETTELSTTEVAMHTSTSSSVTKSYISSQTNDTHKRDTYAATPRAHEVSEISVRTVYPPEEETGERVQLAHHFSEPEITLIIFGVMAGVIGTILLISYGIRRLIKKSPSDVKPLPSPDTDVPLSSVEIENPETSDQ

SEQ ID NO: 1593 - protein, 341 aa, Homo sapiens
GSHSMRYFFTSVSRPGRGEPRFIAVGYVDDTQFVRFDSDAASQKMEPRAPWIEQEGPEYWDQETRNMKAHSQTDRANLGTLRGYYNQSEDGSHTIQIMYGCDVGPDGRFLRGYRQDAYDGKDYIALNEDLRSWTAADMAAQITKRKWEAVHAAEQRRVYLEGRCVDGLRRYLENGKETLQRTDPPKTHMTHHPISDHEATLRCWALGFYPAEITLTWQRDGEDQTQDTELVETRPAGDGTFQKWAAVVVPSGEEQRYTCHVQHEGLPKPLTLRWELSSQPTIPIVGIIAGLVLLGAVITGAVVAAVMWRRKSSDRKGGSYTQAASSDSAQGSDVSLTACKV

SEQ ID NO: 1594 - protein, 338 aa, Homo sapiens
GSHSMRYFYTAMSRPGRGEPRFIAVGYVDDTQFVRFDSDAASPRTEPRAPWIEQEGPEYWDRNTQIFKTNTQTYRENLRIALRYYNQSEAGSHTWQTMYGCDVGPDGRLLRGHNQYAYDGKDYIALNEDLSSWTAADTAAQITQRKWEAAREAEQLRAYLEGLCVEWLRRHLENGKETLQRADPPKTHVTHHPVSDHEATLRCWALGFYPAEITLTWQRDGEDQTQDTELVETRPAGDRTFQKWAAVVVPSGEEQRYTCHVQHEGLPKPLTLRWEPSSQSTIPIVGIVAGLAVLAVVVIGAVVATVMCRRKSSGGKGGSYSQAASSDSAQGSDVSLTA

SEQ ID NO: 1595 - protein, 342 aa, Homo sapiens; identical to SEQ ID NO: 135

SEQ ID NO: 1596 - protein, 337 aa, Homo sapiens; identical to SEQ ID NO: 136
